United States Patent Application Publication US 2023/0330270 A1 - sequence listing, part 4

SEQ ID NO: 32291 - DNA, 20 bp, synthetic construct
  misc_feature 1..20: note = Description of Artificial Sequence: Synthetic oligonucleotide
  misc_feature 1..20: note = Target: FXN; (+) strand; PAM type: YTN; PAM sequence: CTG
  source 1..20: mol_type = other DNA
actgtaagggaggctgggaa

SEQ ID NO: 32292 - DNA, 20 bp, synthetic construct
  misc_feature 1..20: note = Description of Artificial Sequence: Synthetic oligonucleotide
  misc_feature 1..20: note = Target: FXN; (+) strand; PAM type: YTN; PAM sequence: CTG
  source 1..20: mol_type = other DNA
taagggaggctgggaaatat

SEQ ID NO: 32293 - DNA, 20 bp, synthetic construct
  misc_feature 1..20: note = Description of Artificial Sequence: Synthetic oligonucleotide
  misc_feature 1..20: note = Target: FXN; (+) strand; PAM type: YTN; PAM sequence: CTG
  source 1..20: mol_type = other DNA
ggaaatatagtctagcgagt

SEQ ID NO: 32294 - DNA, 20 bp, synthetic construct
  misc_feature 1..20: note = Description of Artificial Sequence: Synthetic oligonucleotide
  misc_feature 1..20: note = Target: FXN; (+) strand; PAM type: YTN; PAM sequence: CTA
  source 1..20: mol_type = other DNA
gcgagtgccctggaaaaagc

SEQ ID NO: 32295 - DNA, 20 bp, synthetic construct
  misc_feature 1..20: note = Description of Artificial Sequence: Synthetic oligonucleotide
  misc_feature 1..20: note = Target: FXN; (+) strand; PAM type: YTN; PAM sequence: CTG
  source 1..20: mol_type = other DNA
gaaaaagccggcacggcatt

SEQ ID NO: 32296 - DNA, 20 bp, synthetic construct
  misc_feature 1..20: note = Description of Artificial Sequence: Synthetic oligonucleotide
  misc_feature 1..20: note = Target: FXN; (+) strand; PAM type: YTN; PAM sequence: TTC
  source 1..20: mol_type = other DNA
cccatggaaagctgtcaggc

SEQ ID NO: 32297 - DNA, 20 bp, synthetic construct
  misc_feature 1..20: note = Description of Artificial Sequence: Synthetic oligonucleotide
  misc_feature 1..20: note = Target: FXN; (+) strand; PAM type: YTN; PAM sequence: CTG
  source 1..20: mol_type = other DNA
tcaggcacggctacagtcta

SEQ ID NO: 32298 - DNA, 20 bp, synthetic construct
  misc_feature 1..20: note = Description of Artificial Sequence: Synthetic oligonucleotide
  misc_feature 1..20: note = Target: FXN; (+) strand; PAM type: YTN; PAM sequence: CTA
  source 1..20: mol_type = other DNA
cagtctaccccctgccaacc

SEQ ID NO: 32299 - DNA, 20 bp, synthetic construct
  misc_feature 1..20: note = Description of Artificial Sequence: Synthetic oligonucleotide
  misc_feature 1..20: note = Target: FXN; (+) strand; PAM type: YTN; PAM sequence: CTA
  source 1..20: mol_type = other DNA
ccccctgccaaccagtatct

SEQ ID NO: 32300 - DNA, 20 bp, synthetic construct
  misc_feature 1..20: note = Description of Artificial Sequence: Synthetic oligonucleotide
  misc_feature 1..20: note = Target: FXN; (+) strand; PAM type: YTN; PAM sequence: CTG
  source 1..20: mol_type = other DNA
ccaaccagtatctgcatgga

SEQ ID NO: 32301 - DNA, 20 bp, synthetic construct
  misc_feature 1..20: note = Description of Artificial Sequence: Synthetic oligonucleotide
  misc_feature 1..20: note = Target: FXN; (+) strand; PAM type: YTN; PAM sequence: CTG
  source 1..20: mol_type = other DNA
catggaccctccttccacac

SEQ ID NO: 32302 - DNA, 20 bp, synthetic construct
  misc_feature 1..20: note = Description of Artificial Sequence: Synthetic oligonucleotide
  misc_feature 1..20: note = Target: FXN; (+) strand; PAM type: YTN; PAM sequence: CTC
  source 1..20: mol_type = other DNA
cttccacactcagatgcatt

SEQ ID NO: 32303 - DNA, 20 bp, synthetic construct
  misc_feature 1..20: note = Description of Artificial Sequence: Synthetic oligonucleotide
  misc_feature 1..20: note = Target: FXN; (+) strand; PAM type: YTN; PAM sequence: CTT
  source 1..20: mol_type = other DNA
ccacactcagatgcatttac

SEQ ID NO: 32304 - DNA, 20 bp, synthetic construct
  misc_feature 1..20: note = Description of Artificial Sequence: Synthetic oligonucleotide
  misc_feature 1..20: note = Target: FXN; (+) strand; PAM type: YTN; PAM sequence: TTC
  source 1..20: mol_type = other DNA
cacactcagatgcatttacc

SEQ ID NO: 32305 - DNA, 20 bp, synthetic construct
  misc_feature 1..20: note = Description of Artificial Sequence: Synthetic oligonucleotide
  misc_feature 1..20: note = Target: FXN; (+) strand; PAM type: YTN; PAM sequence: CTC
  source 1..20: mol_type = other DNA
agatgcatttacccccagcc

SEQ ID NO: 32306 - DNA, 20 bp, synthetic construct
  misc_feature 1..20: note = Description of Artificial Sequence: Synthetic oligonucleotide
  misc_feature 1..20: note = Target: FXN; (+) strand; PAM type: YTN; PAM sequence: TTT
  source 1..20: mol_type = other DNA
acccccagccccaagagagc

SEQ ID NO: 32307 - DNA, 20 bp, synthetic construct
  misc_feature 1..20: note = Description of Artificial Sequence: Synthetic oligonucleotide
  misc_feature 1..20: note = Target: FXN; (+) strand; PAM type: YTN; PAM sequence: TTA
  source 1..20: mol_type = other DNA
cccccagccccaagagagcc

SEQ ID NO: 32308 - DNA, 20 bp, synthetic construct
  misc_feature 1..20: note = Description of Artificial Sequence: Synthetic oligonucleotide
  misc_feature 1..20: note = Target: FXN; (+) strand; PAM type: YTN; PAM sequence: CTC
  source 1..20: mol_type = other DNA
cgagtccaagatttccaggt

SEQ ID NO: 32309 - DNA, 20 bp, synthetic construct
  misc_feature 1..20: note = Description of Artificial Sequence: Synthetic oligonucleotide
  misc_feature 1..20: note = Target: FXN; (+) strand; PAM type: YTN; PAM sequence: TTT
  source 1..20: mol_type = other DNA
ccaggtgacatgcagtctcc

SEQ ID NO: 32310 - DNA, 20 bp, synthetic construct
  misc_feature 1..20: note = Description of Artificial Sequence: Synthetic oligonucleotide
  misc_feature 1..20: note = Target: FXN; (+) strand; PAM type: YTN; PAM sequence: TTC
  source 1..20: mol_type = other DNA
caggtgacatgcagtctcct

SEQ ID NO: 32311 - DNA, 20 bp, synthetic construct
  misc_feature 1..20: note = Description of Artificial Sequence: Synthetic oligonucleotide
  misc_feature 1..20: note = Target: FXN; (+) strand; PAM type: YTN; PAM sequence: CTC
  source 1..20: mol_type = other DNA
ctctctcccagctttaggaa

SEQ ID NO: 32312 - DNA, 20 bp, synthetic construct
  misc_feature 1..20: note = Description of Artificial Sequence: Synthetic oligonucleotide
  misc_feature 1..20: note = Target: FXN; (+) strand; PAM type: YTN; PAM sequence: CTC
  source 1..20: mol_type = other DNA
tctcccagctttaggaatgg

SEQ ID NO: 32313 - DNA, 20 bp, synthetic construct
  misc_feature 1..20: note = Description of Artificial Sequence: Synthetic oligonucleotide
  misc_feature 1..20: note = Target: FXN; (+) strand; PAM type: YTN; PAM sequence: CTC
  source 1..20: mol_type = other DNA
tcccagctttaggaatggct

SEQ ID NO: 32314 - DNA, 20 bp, synthetic construct
  misc_feature 1..20: note = Description of Artificial Sequence: Synthetic oligonucleotide
  misc_feature 1..20: note = Target: FXN; (+) strand; PAM type: YTN; PAM sequence: CTC
  source 1..20: mol_type = other DNA
ccagctttaggaatggcttc

SEQ ID NO: 32315 - DNA, 20 bp, synthetic construct
  misc_feature 1..20: note = Description of Artificial Sequence: Synthetic oligonucleotide
  misc_feature 1..20: note = Target: FXN; (+) strand; PAM type: YTN; PAM sequence: CTT
  source 1..20: mol_type = other DNA
taggaatggcttcttctgat

SEQ ID NO: 32316 - DNA, 20 bp, synthetic construct
  misc_feature 1..20: note = Description of Artificial Sequence: Synthetic oligonucleotide
  misc_feature 1..20: note = Target: FXN; (+) strand; PAM type: YTN; PAM sequence: TTT
  source 1..20: mol_type = other DNA
aggaatggcttcttctgatc

SEQ ID NO: 32317 - DNA, 20 bp, synthetic construct
  misc_feature 1..20: note = Description of Artificial Sequence: Synthetic oligonucleotide
  misc_feature 1..20: note = Target: FXN; (+) strand; PAM type: YTN; PAM sequence: TTA
  source 1..20: mol_type = other DNA
ggaatggcttcttctgatct

SEQ ID NO: 32318 - DNA, 20 bp, synthetic construct
  misc_feature 1..20: note = Description of Artificial Sequence: Synthetic oligonucleotide
  misc_feature 1..20: note = Target: FXN; (+) strand; PAM type: YTN; PAM sequence: CTT
  source 1..20: mol_type = other DNA
cttctgatctacacacagac

SEQ ID NO: 32319 - DNA, 20 bp, synthetic construct
  misc_feature 1..20: note = Description of Artificial Sequence: Synthetic oligonucleotide
  misc_feature 1..20: note = Target: FXN; (+) strand; PAM type: YTN; PAM sequence: TTC
  source 1..20: mol_type = other DNA
ttctgatctacacacagaca

SEQ ID NO: 32320 - DNA, 20 bp, synthetic construct
  misc_feature 1..20: note = Description of Artificial Sequence: Synthetic oligonucleotide
  misc_feature 1..20: note = Target: FXN; (+) strand; PAM type: YTN; PAM sequence: CTT
  source 1..20: mol_type = other DNA
ctgatctacacacagacaca

SEQ ID NO: 32321 - DNA, 20 bp, synthetic construct
  misc_feature 1..20: note = Description of Artificial Sequence: Synthetic oligonucleotide
  misc_feature 1..20: note = Target: FXN; (+) strand; PAM type: YTN; PAM sequence: TTC
  source 1..20: mol_type = other DNA
tgatctacacacagacacag

SEQ ID NO: 32322 - DNA, 20 bp, synthetic construct
  misc_feature 1..20: note = Description of Artificial Sequence: Synthetic oligonucleotide
  misc_feature 1..20: note = Target: FXN; (+) strand; PAM type: YTN; PAM sequence: CTG
  source 1..20: mol_type = other DNA
atctacacacagacacagac

SEQ ID NO: 32323 - DNA, 20 bp, synthetic construct
  misc_feature 1..20: note = Description of Artificial Sequence: Synthetic oligonucleotide
  misc_feature 1..20: note = Target: FXN; (+) strand; PAM type: YTN; PAM sequence: CTA
  source 1..20: mol_type = other DNA
cacacagacacagacacaca

SEQ ID NO: 32324 - DNA, 20 bp, synthetic construct
  misc_feature 1..20: note = Description of Artificial Sequence: Synthetic oligonucleotide
  misc_feature 1..20: note = Target: FXN; (+) strand; PAM type: YTN; PAM sequence: CTG
  source 1..20: mol_type = other DNA
caactgtaactccattcaga

SEQ ID NO: 32325 - DNA, 20 bp, synthetic construct
  misc_feature 1..20: note = Description of Artificial Sequence: Synthetic oligonucleotide
  misc_feature 1..20: note = Target: FXN; (+) strand; PAM type: YTN; PAM sequence: CTG
  source 1..20: mol_type = other DNA
taactccattcagaaaagag

SEQ ID NO: 32326 - DNA, 20 bp, synthetic construct
  misc_feature 1..20: note = Description of Artificial Sequence: Synthetic oligonucleotide
  misc_feature 1..20: note = Target: FXN; (+) strand; PAM type: YTN; PAM sequence: CTC
  source 1..20: mol_type = other DNA
cattcagaaaagaggcacag

SEQ ID NO: 32327 - DNA, 20 bp, synthetic construct
  misc_feature 1..20: note = Description of Artificial Sequence: Synthetic oligonucleotide
  misc_feature 1..20: note = Target: FXN; (+) strand; PAM type: YTN; PAM sequence: TTC
  source 1..20: mol_type = other DNA
agaaaagaggcacagcacta

SEQ ID NO: 32328 - DNA, 20 bp, synthetic construct
  misc_feature 1..20: note = Description of Artificial Sequence: Synthetic oligonucleotide
  misc_feature 1..20: note = Target: FXN; (+) strand; PAM type: YTN; PAM sequence: CTA
  source 1..20: mol_type = other DNA
gctgcccgcagcactggagc

SEQ ID NO: 32329 - DNA, 20 bp, synthetic construct
  misc_feature 1..20: note = Description of Artificial Sequence: Synthetic oligonucleotide
  misc_feature 1..20: note = Target: FXN; (+) strand; PAM type: YTN; PAM sequence: CTG
  source 1..20: mol_type = other DNA
cccgcagcactggagccctg

SEQ ID NO: 32330 - DNA, 20 bp, synthetic construct
  misc_feature 1..20: note = Description of Artificial Sequence: Synthetic oligonucleotide
  misc_feature 1..20: note = Target: FXN; (+) strand; PAM type: YTN; PAM sequence: CTG
  source 1..20: mol_type = other DNA
gagccctgctgggcagcact

SEQ ID NO: 32331 - DNA, 20 bp, synthetic construct
  misc_feature 1..20: note = Description of Artificial Sequence: Synthetic oligonucleotide
  misc_feature 1..20: note = Target: FXN; (+) strand; PAM type: YTN; PAM sequence: CTG
  source 1..20: mol_type = other DNA
ctgggcagcactggatcaac

SEQ ID NO: 32332 - DNA, 20 bp, synthetic construct
  misc_feature 1..20: note = Description of Artificial Sequence: Synthetic oligonucleotide
  misc_feature 1..20: note = Target: FXN; (+) strand; PAM type: YTN; PAM sequence: CTG
  source 1..20: mol_type = other DNA
ggcagcactggatcaacctc

SEQ ID NO: 32333 - DNA, 20 bp, synthetic construct
  misc_feature 1..20: note = Description of Artificial Sequence: Synthetic oligonucleotide
  misc_feature 1..20: note = Target: FXN; (+) strand; PAM type: YTN; PAM sequence: CTG
  source 1..20: mol_type = other DNA
gatcaacctctgccctggca

SEQ ID NO: 32334 - DNA, 20 bp, synthetic construct
  misc_feature 1..20: note = Description of Artificial Sequence: Synthetic oligonucleotide
  misc_feature 1..20: note = Target: FXN; (+) strand; PAM type: YTN; PAM sequence: CTC
  source 1..20: mol_type = other DNA
tgccctggcagaggagcatg

SEQ ID NO: 32335 - DNA, 20 bp, synthetic construct
  misc_feature 1..20: note = Description of Artificial Sequence: Synthetic oligonucleotide
  misc_feature 1..20: note = Target: FXN; (+) strand; PAM type: YTN; PAM sequence: CTG
  source 1..20: mol_type = other DNA
ccctggcagaggagcatgtt

SEQ ID NO: 32336 - DNA, 20 bp, synthetic construct
  misc_feature 1..20: note = Description of Artificial Sequence: Synthetic oligonucleotide
  misc_feature 1..20: note = Target: FXN; (+) strand; PAM type: YTN; PAM sequence: CTG
  source 1..20: mol_type = other DNA
gcagaggagcatgttcctcc

SEQ ID NO: 32337 - DNA, 20 bp, synthetic construct
  misc_feature 1..20: note = Description of Artificial Sequence: Synthetic oligonucleotide
  misc_feature 1..20: note = Target: FXN; (+) strand; PAM type: YTN; PAM sequence: TTC
  source 1..20: mol_type = other DNA
ctccacaaatccctgcttca

SEQ ID NO: 32338 - DNA, 20 bp, synthetic construct
  misc_feature 1..20: note = Description of Artificial Sequence: Synthetic oligonucleotide
  misc_feature 1..20: note = Target: FXN; (+) strand; PAM type: YTN; PAM sequence: CTC
  source 1..20: mol_type = other DNA
cacaaatccctgcttcagcc

SEQ ID NO: 32339 - DNA, 20 bp, synthetic construct
  misc_feature 1..20: note = Description of Artificial Sequence: Synthetic oligonucleotide
  misc_feature 1..20: note = Target: FXN; (+) strand; PAM type: YTN; PAM sequence: CTG
  source 1..20: mol_type = other DNA
cttcagcctctcgagaggct

SEQ ID NO: 32340 - DNA, 20 bp, synthetic construct
  misc_feature 1..20: note = Description of Artificial Sequence: Synthetic oligonucleotide
  misc_feature 1..20: note = Target: FXN; (+) strand; PAM type: YTN; PAM sequence: CTT
  source 1..20: mol_type = other DNA
cagcctctcgagaggctcct

SEQ ID NO: 32341 - DNA, 20 bp, synthetic construct
  misc_feature 1..20: note = Description of Artificial Sequence: Synthetic oligonucleotide
  misc_feature 1..20: note = Target: FXN; (+) strand; PAM type: YTN; PAM sequence: TTC
  source 1..20: mol_type = other DNA
agcctctcgagaggctcctc

SEQ ID NO: 32342 - DNA, 20 bp, synthetic construct
  misc_feature 1..20: note = Description of Artificial Sequence: Synthetic oligonucleotide
  misc_feature 1..20: note = Target: FXN; (+) strand; PAM type: YTN; PAM sequence: CTC
  source 1..20: mol_type = other DNA
tcgagaggctcctccttgtc

SEQ ID NO: 32343 - DNA, 20 bp, synthetic construct
  misc_feature 1..20: note = Description of Artificial Sequence: Synthetic oligonucleotide
  misc_feature 1..20: note = Target: FXN; (+) strand; PAM type: YTN; PAM sequence: CTC
  source 1..20: mol_type = other DNA
gagaggctcctccttgtctg

SEQ ID NO: 32344 - DNA, 20 bp, synthetic construct
  misc_feature 1..20: note = Description of Artificial Sequence: Synthetic oligonucleotide
  misc_feature 1..20: note = Target: FXN; (+) strand; PAM type: YTN; PAM sequence: CTC
  source 1..20: mol_type = other DNA
ctccttgtctgttattttcc

SEQ ID NO: 32345 - DNA, 20 bp, synthetic construct
  misc_feature 1..20: note = Description of Artificial Sequence: Synthetic oligonucleotide
  misc_feature 1..20: note = Target: FXN; (+) strand; PAM type: YTN; PAM sequence: CTC
  source 1..20: mol_type = other DNA
cttgtctgttattttccttg

SEQ ID NO: 32346 - DNA, 20 bp, synthetic construct
  misc_feature 1..20: note = Description of Artificial Sequence: Synthetic oligonucleotide
  misc_feature 1..20: note = Target: FXN; (+) strand; PAM type: YTN; PAM sequence: CTT
  source 1..20: mol_type = other DNA
gtctgttattttccttggcc

SEQ ID NO: 32347 - DNA, 20 bp, synthetic construct
  misc_feature 1..20: note = Description of Artificial Sequence: Synthetic oligonucleotide
  misc_feature 1..20: note = Target: FXN; (+) strand; PAM type: YTN; PAM sequence: TTG
  source 1..20: mol_type = other DNA
tctgttattttccttggcca

SEQ ID NO: 32348 - DNA, 20 bp, synthetic construct
  misc_feature 1..20: note = Description of Artificial Sequence: Synthetic oligonucleotide
  misc_feature 1..20: note = Target: FXN; (+) strand; PAM type: YTN; PAM sequence: CTG
  source 1..20: mol_type = other DNA
ttattttccttggccacaag

SEQ ID NO: 32349 - DNA, 20 bp, synthetic construct
  misc_feature 1..20: note = Description of Artificial Sequence: Synthetic oligonucleotide
  misc_feature 1..20: note = Target: FXN; (+) strand; PAM type: YTN; PAM sequence: TTA
  source 1..20: mol_type = other DNA
ttttccttggccacaaggca

SEQ ID NO: 32350 - DNA, 20 bp, synthetic construct
  misc_feature 1..20: note = Description of Artificial Sequence: Synthetic oligonucleotide
  misc_feature 1..20: note = Target: FXN; (+) strand; PAM type: YTN; PAM sequence: TTT
  source 1..20: mol_type = other DNA
tccttggccacaaggcaggc

SEQ ID NO: 32351 - DNA, 20 bp, synthetic construct
  misc_feature 1..20: note = Description of Artificial Sequence: Synthetic oligonucleotide
  misc_feature 1..20: note = Target: FXN; (+) strand; PAM type: YTN; PAM sequence: TTT
  source 1..20: mol_type = other DNA
ccttggccacaaggcaggca

SEQ ID NO: 32352 - DNA, 20 bp, synthetic construct
  misc_feature 1..20: note = Description of Artificial Sequence: Synthetic oligonucleotide
  misc_feature 1..20: note = Target: FXN; (+) strand; PAM type: YTN; PAM sequence: TTC
  source 1..20: mol_type = other DNA
cttggccacaaggcaggcag

SEQ ID NO: 32353 - DNA, 20 bp, synthetic construct
  misc_feature 1..20: note = Description of Artificial Sequence: Synthetic oligonucleotide
  misc_feature 1..20: note = Target: FXN; (+) strand; PAM type: YTN; PAM sequence: CTT
  source 1..20: mol_type = other DNA
ggccacaaggcaggcaggca

SEQ ID NO: 32354 - DNA, 20 bp, synthetic construct
  misc_feature 1..20: note = Description of Artificial Sequence: Synthetic oligonucleotide
  misc_feature 1..20: note = Target: FXN; (+) strand; PAM type: YTN; PAM sequence: TTG
  source 1..20: mol_type = other DNA
gccacaaggcaggcaggcag

SEQ ID NO: 32355 - DNA, 20 bp, synthetic construct
  misc_feature 1..20: note = Description of Artificial Sequence: Synthetic oligonucleotide
  misc_feature 1..20: note = Target: FXN; (+) strand; PAM type: YTN; PAM sequence: CTC
  source 1..20: mol_type = other DNA
ctccggggcaaggagccttc

SEQ ID NO: 32356 - DNA, 20 bp, synthetic construct
  misc_feature 1..20: note = Description of Artificial Sequence: Synthetic oligonucleotide
  misc_feature 1..20: note = Target: FXN; (+) strand; PAM type: YTN; PAM sequence: CTC
  source 1..20: mol_type = other DNA
cggggcaaggagccttcaca

SEQ ID NO: 32357 - DNA, 20 bp, synthetic construct
  misc_feature 1..20: note = Description of Artificial Sequence: Synthetic oligonucleotide
  misc_feature 1..20: note = Target: FXN; (+) strand; PAM type: YTN; PAM sequence: CTT
  source 1..20: mol_type = other DNA
cacagcccacttcctgctaa

SEQ ID NO: 32358 - DNA, 20 bp, synthetic construct
  misc_feature 1..20: note = Description of Artificial Sequence: Synthetic oligonucleotide
  misc_feature 1..20: note = Target: FXN; (+) strand; PAM type: YTN; PAM sequence: TTC
  source 1..20: mol_type = other DNA
acagcccacttcctgctaat

SEQ ID NO: 32359 - DNA, 20 bp, synthetic construct
  misc_feature 1..20: note = Description of Artificial Sequence: Synthetic oligonucleotide
  misc_feature 1..20: note = Target: FXN; (+) strand; PAM type: YTN; PAM sequence: CTT
  source 1..20: mol_type = other DNA
cctgctaataacagtttggg

SEQ ID NO: 32360 - DNA, 20 bp, synthetic construct
  misc_feature 1..20: note = Description of Artificial Sequence: Synthetic oligonucleotide
  misc_feature 1..20: note = Target: FXN; (+) strand; PAM type: YTN; PAM sequence: TTC
  source 1..20: mol_type = other DNA
ctgctaataacagtttgggg

SEQ ID NO: 32361 - DNA, 20 bp, synthetic construct
  misc_feature 1..20: note = Description of Artificial Sequence: Synthetic oligonucleotide
  misc_feature 1..20: note = Target: FXN; (+) strand; PAM type: YTN; PAM sequence: CTG
  source 1..20: mol_type = other DNA
ctaataacagtttggggttc

SEQ ID NO: 32362 - DNA, 20 bp, synthetic construct
  misc_feature 1..20: note = Description of Artificial Sequence: Synthetic oligonucleotide
  misc_feature 1..20: note = Target: FXN; (+) strand; PAM type: YTN; PAM sequence: CTA
  source 1..20: mol_type = other DNA
ataacagtttggggttccac

SEQ ID NO: 32363 - DNA, 20 bp, synthetic construct
  misc_feature 1..20: note = Description of Artificial Sequence: Synthetic oligonucleotide
  misc_feature 1..20: note = Target: FXN; (+) strand; PAM type: YTN; PAM sequence: TTT
  source 1..20: mol_type = other DNA
ggggttccacagggtgtttt

SEQ ID NO: 32364 - DNA, 20 bp, synthetic construct
  misc_feature 1..20: note = Description of Artificial Sequence: Synthetic oligonucleotide
  misc_feature 1..20: note = Target: FXN; (+) strand; PAM type: YTN; PAM sequence: TTG
  source 1..20: mol_type = other DNA
gggttccacagggtgtttta

SEQ ID NO: 32365 - DNA, 20 bp, synthetic construct
  misc_feature 1..20: note = Description of Artificial Sequence: Synthetic oligonucleotide
  misc_feature 1..20: note = Target: FXN; (+) strand; PAM type: YTN; PAM sequence: TTC
  source 1..20: mol_type = other DNA
cacagggtgttttaagactc

SEQ ID NO: 32366 - DNA, 20 bp, synthetic construct
  misc_feature 1..20: note = Description of Artificial Sequence: Synthetic oligonucleotide
  misc_feature 1..20: note = Target: FXN; (+) strand; PAM type: YTN; PAM sequence: TTT
  source 1..20: mol_type = other DNA
taagactccagtcagctatt

SEQ ID NO: 32367 - DNA, 20 bp, synthetic construct
  misc_feature 1..20: note = Description of Artificial Sequence: Synthetic oligonucleotide
  misc_feature 1..20: note = Target: FXN; (+) strand; PAM type: YTN; PAM sequence: TTT
  source 1..20: mol_type = other DNA
aagactccagtcagctattt

SEQ ID NO: 32368 - DNA, 20 bp, synthetic construct
  misc_feature 1..20: note = Description of Artificial Sequence: Synthetic oligonucleotide
  misc_feature 1..20: note = Target: FXN; (+) strand; PAM type: YTN; PAM sequence: TTA
  source 1..20: mol_type = other DNA
agactccagtcagctatttt

SEQ ID NO: 32369 - DNA, 20 bp, synthetic construct
  misc_feature 1..20: note = Description of Artificial Sequence: Synthetic oligonucleotide
  misc_feature 1..20: note = Target: FXN; (+) strand; PAM type: YTN; PAM sequence: CTC
  source 1..20: mol_type = other DNA
cagtcagctattttaggcca

SEQ ID NO: 32370 - DNA, 20 bp, synthetic construct
  misc_feature 1..20: note = Description of Artificial Sequence: Synthetic oligonucleotide
  misc_feature 1..20: note = Target: FXN; (+) strand; PAM type: YTN; PAM sequence: CTA
  source 1..20: mol_type = other DNA
ttttaggccagactcatttc

SEQ ID NO: 32371 - DNA, 20 bp, synthetic construct
  misc_feature 1..20: note = Description of Artificial Sequence: Synthetic oligonucleotide
  misc_feature 1..20: note = Target: FXN; (+) strand; PAM type: YTN; PAM sequence: TTT
  source 1..20: mol_type = other DNA
taggccagactcatttctct

SEQ ID NO: 32372 - DNA, 20 bp, synthetic construct
  misc_feature 1..20: note = Description of Artificial Sequence: Synthetic oligonucleotide
  misc_feature 1..20: note = Target: FXN; (+) strand; PAM type: YTN; PAM sequence: TTT
  source 1..20: mol_type = other DNA
aggccagactcatttctctc

SEQ ID NO: 32373 - DNA, 20 bp, synthetic construct
  misc_feature 1..20: note = Description of Artificial Sequence: Synthetic oligonucleotide
  misc_feature 1..20: note = Target: FXN; (+) strand; PAM type: YTN; PAM sequence: TTA
  source 1..20: mol_type = other DNA
ggccagactcatttctctct

SEQ ID NO: 32374 - DNA, 20 bp, synthetic construct
  misc_feature 1..20: note = Description of Artificial Sequence: Synthetic oligonucleotide
  misc_feature 1..20: note = Target: FXN; (+) strand; PAM type: YTN; PAM sequence: CTC
  source 1..20: mol_type = other DNA
atttctctctctctctctct

SEQ ID NO: 32375 - DNA, 20 bp, synthetic construct
  misc_feature 1..20: note = Description of Artificial Sequence: Synthetic oligonucleotide
  misc_feature 1..20: note = Target: FXN; (+) strand; PAM type: YTN; PAM sequence: TTT
  source 1..20: mol_type = other DNA
ctctctctctctctcttttt

SEQ ID NO: 32376 - DNA, 20 bp, synthetic construct
  misc_feature 1..20: note = Description of Artificial Sequence: Synthetic oligonucleotide
  misc_feature 1..20: note = Target: FXN; (+) strand; PAM type: YTN; PAM sequence: TTC
  source 1..20: mol_type = other DNA
tctctctctctctctttttt

SEQ ID NO: 32377 - DNA, 20 bp, synthetic construct
  misc_feature 1..20: note = Description of Artificial Sequence: Synthetic oligonucleotide
  misc_feature 1..20: note = Target: FXN; (+) strand; PAM type: YTN; PAM sequence: CTC
  source 1..20: mol_type = other DNA
tctctctctctctttttttt

SEQ ID NO: 32378 - DNA, 20 bp, synthetic construct
  misc_feature 1..20: note = Description of Artificial Sequence: Synthetic oligonucleotide
  misc_feature 1..20: note = Target: FXN; (+) strand; PAM type: YTN; PAM sequence: CTC
  source 1..20: mol_type = other DNA
tctctctctctttttttttc

SEQ ID NO: 32379 - DNA, 20 bp, synthetic construct
  misc_feature 1..20: note = Description of Artificial Sequence: Synthetic oligonucleotide
  misc_feature 1..20: note = Target: FXN; (+) strand; PAM type: YTN; PAM sequence: CTC
  source 1..20: mol_type = other DNA
tctctctctttttttttctt

SEQ ID NO: 32380 - DNA, 20 bp, synthetic construct
  misc_feature 1..20: note = Description of Artificial Sequence: Synthetic oligonucleotide
  misc_feature 1..20: note = Target: FXN; (+) strand; PAM type: YTN; PAM sequence: CTC
  source 1..20: mol_type = other DNA
tctctctttttttttctttt

SEQ ID NO: 32381 - DNA, 20 bp, synthetic construct
  misc_feature 1..20: note = Description of Artificial Sequence: Synthetic oligonucleotide
  misc_feature 1..20: note = Target: FXN; (+) strand; PAM type: YTN; PAM sequence: CTC
  source 1..20: mol_type = other DNA
tctctttttttttcttttat

SEQ ID NO: 32382 - DNA, 20 bp, synthetic construct
  misc_feature 1..20: note = Description of Artificial Sequence: Synthetic oligonucleotide
  misc_feature 1..20: note = Target: FXN; (+) strand; PAM type: YTN; PAM sequence: CTC
  source 1..20: mol_type = other DNA
tctttttttttcttttatga

SEQ ID NO: 32383 - DNA, 20 bp, synthetic construct
  misc_feature 1..20: note = Description of Artificial Sequence: Synthetic oligonucleotide
  misc_feature 1..20: note = Target: FXN; (+) strand; PAM type: YTN; PAM sequence: CTC
  source 1..20: mol_type = other DNA
tttttttttcttttatgaaa

SEQ ID NO: 32384 - DNA, 20 bp, synthetic construct
  misc_feature 1..20: note = Description of Artificial Sequence: Synthetic oligonucleotide
  misc_feature 1..20: note = Target: FXN; (+) strand; PAM type: YTN; PAM sequence: CTT
  source 1..20: mol_type = other DNA
tttttttcttttatgaaatc

SEQ ID NO: 32385 - DNA, 20 bp, synthetic construct
  misc_feature 1..20: note = Description of Artificial Sequence: Synthetic oligonucleotide
  misc_feature 1..20: note = Target: FXN; (+) strand; PAM type: YTN; PAM sequence: TTT
  source 1..20: mol_type = other DNA
ttttttcttttatgaaatca

SEQ ID NO: 32386 - DNA, 20 bp, synthetic construct
  misc_feature 1..20: note = Description of Artificial Sequence: Synthetic oligonucleotide
  misc_feature 1..20: note = Target: FXN; (+) strand; PAM type: YTN; PAM sequence: TTT
  source 1..20: mol_type = other DNA
tttttcttttatgaaatcac

SEQ ID NO: 32387 - DNA, 20 bp, synthetic construct
  misc_feature 1..20: note = Description of Artificial Sequence: Synthetic oligonucleotide
  misc_feature 1..20: note = Target: FXN; (+) strand; PAM type: YTN; PAM sequence: TTT
  source 1..20: mol_type = other DNA
ttttcttttatgaaatcaca

SEQ ID NO: 32388 - DNA, 20 bp, synthetic construct
  misc_feature 1..20: note = Description of Artificial Sequence: Synthetic oligonucleotide
  misc_feature 1..20: note = Target: FXN; (+) strand; PAM type: YTN; PAM sequence: TTT
  source 1..20: mol_type = other DNA
tttcttttatgaaatcacac

SEQ ID NO: 32389 - DNA, 20 bp, synthetic construct
  misc_feature 1..20: note = Description of Artificial Sequence: Synthetic oligonucleotide
  misc_feature 1..20: note = Target: FXN; (+) strand; PAM type: YTN; PAM sequence: TTT
  source 1..20: mol_type = other DNA
ttcttttatgaaatcacacc

SEQ ID NO: 32390 - DNA, 20 bp, synthetic construct
  misc_feature 1..20: note = Description of Artificial Sequence: Synthetic oligonucleotide
  misc_feature 1..20: note = Target: FXN; (+) strand; PAM type: YTN; PAM sequence: TTT
  source 1..20: mol_type = other DNA
tcttttatgaaatcacaccc

SEQ ID NO: 32391 - DNA, 20 bp, synthetic construct
  misc_feature 1..20: note = Description of Artificial Sequence: Synthetic oligonucleotide
  misc_feature 1..20: note = Target: FXN; (+) strand; PAM type: YTN; PAM sequence: TTT
  source 1..20: mol_type = other DNA
cttttatgaaatcacaccct

SEQ ID NO: 32392 - DNA, 20 bp, synthetic construct
  misc_feature 1..20: note = Description of Artificial Sequence: Synthetic oligonucleotide
  misc_feature 1..20: note = Target: FXN; (+) strand; PAM type: YTN; PAM sequence: TTC
  source 1..20: mol_type = other DNA
ttttatgaaatcacaccctg

SEQ ID NO: 32393 - DNA, 20 bp, synthetic construct
  misc_feature 1..20: note = Description of Artificial Sequence: Synthetic oligonucleotide
  misc_feature 1..20: note = Target: FXN; (+) strand; PAM type: YTN; PAM sequence: CTT
  source 1..20: mol_type = other DNA
ttatgaaatcacaccctgag

SEQ ID NO: 32394 - DNA, 20 bp, synthetic construct
  misc_feature 1..20: note = Description of Artificial Sequence: Synthetic oligonucleotide
  misc_feature 1..20: note = Target: FXN; (+) strand; PAM type: YTN; PAM sequence: TTT
  source 1..20: mol_type = other DNA
tatgaaatcacaccctgaga

SEQ ID NO: 32395 - DNA, 20 bp, synthetic construct
  misc_feature 1..20: note = Description of Artificial Sequence: Synthetic oligonucleotide
  misc_feature 1..20: note = Target: FXN; (+) strand; PAM type: YTN; PAM sequence: TTT
  source 1..20: mol_type = other DNA
atgaaatcacaccctgagac

SEQ ID NO: 32396 - DNA, 20 bp, synthetic construct
  misc_feature 1..20: note = Description of Artificial Sequence: Synthetic oligonucleotide
  misc_feature 1..20: note = Target: FXN; (+) strand; PAM type: YTN; PAM sequence: TTA
  source 1..20: mol_type = other DNA
tgaaatcacaccctgagacc

SEQ ID NO: 32397 - DNA, 20 bp, synthetic construct
  misc_feature 1..20: note = Description of Artificial Sequence: Synthetic oligonucleotide
  misc_feature 1..20: note = Target: FXN; (+) strand; PAM type: YTN; PAM sequence: CTG
  source 1..20: mol_type = other DNA
agacccaggctggagtgcag

SEQ ID NO: 32398 - DNA, 20 bp, synthetic construct
  misc_feature 1..20: note = Description of Artificial Sequence: Synthetic oligonucleotide
  misc_feature 1..20: note = Target: FXN; (+) strand; PAM type: YTN; PAM sequence: CTG
  source 1..20: mol_type = other DNA
gagtgcagtggtgcgatctc

SEQ ID NO: 32399 - DNA, 20 bp, synthetic construct
  misc_feature 1..20: note = Description of Artificial Sequence: Synthetic oligonucleotide
  misc_feature 1..20: note = Target: FXN; (+) strand; PAM type: YTN; PAM sequence: CTC
  source 1..20: mol_type = other DNA
ggctcactgcagcctccgcc

SEQ ID NO: 32400 - DNA, 20 bp, synthetic construct
  misc_feature 1..20: note = Description of Artificial Sequence: Synthetic oligonucleotide
  misc_feature 1..20: note = Target: FXN; (+) strand; PAM type: YTN; PAM sequence: CTC
  source 1..20: mol_type = other DNA
actgcagcctccgcctcccg

SEQ ID NO: 32401 - DNA, 20 bp, synthetic construct
  misc_feature 1..20: note = Description of Artificial Sequence: Synthetic oligonucleotide
  misc_feature 1..20: note = Target: FXN; (+) strand; PAM type: YTN; PAM sequence: CTG
  source 1..20: mol_type = other DNA
cagcctccgcctcccgggtt

SEQ ID NO: 32402 - DNA, 20 bp, synthetic construct
  misc_feature 1..20: note = Description of Artificial Sequence: Synthetic oligonucleotide
  misc_feature 1..20: note = Target: FXN; (+) strand; PAM type: YTN; PAM sequence: CTC
  source 1..20: mol_type = other DNA
cgcctcccgggttcaagcaa

SEQ ID NO: 32403 - DNA, 20 bp, synthetic construct
  misc_feature 1..20: note = Description of Artificial Sequence: Synthetic oligonucleotide
  misc_feature 1..20: note = Target: FXN; (+) strand; PAM type: YTN; PAM sequence: CTC
  source 1..20: mol_type = other DNA
ccgggttcaagcaatcctcc

SEQ ID NO: 32404 - DNA, 20 bp, synthetic construct
  misc_feature 1..20: note = Description of Artificial Sequence: Synthetic oligonucleotide
  misc_feature 1..20: note = Target: FXN; (+) strand; PAM type: YTN; PAM sequence: TTC
  source 1..20: mol_type = other DNA
aagcaatcctcctgcctcag

SEQ ID NO: 32405 - DNA, 20 bp, synthetic construct
  misc_feature 1..20: note = Description of Artificial Sequence: Synthetic oligonucleotide
  misc_feature 1..20: note = Target: FXN; (+) strand; PAM type: YTN; PAM sequence: CTC
  source 1..20: mol_type = other DNA
ctgcctcagcctcctgagta

SEQ ID NO: 32406 - DNA, 20 bp, synthetic construct
  misc_feature 1..20: note = Description of Artificial Sequence: Synthetic oligonucleotide
  misc_feature 1..20: note = Target: FXN; (+) strand; PAM type: YTN; PAM sequence: CTG
  source 1..20: mol_type = other DNA
cctcagcctcctgagtagct

SEQ ID NO: 32407 - DNA, 20 bp, synthetic construct
  misc_feature 1..20: note = Description of Artificial Sequence: Synthetic oligonucleotide
  misc_feature 1..20: note = Target: FXN; (+) strand; PAM type: YTN; PAM sequence: CTC
  source 1..20: mol_type = other DNA
agcctcctgagtagctggga

SEQ ID NO: 32408 - DNA, 20 bp, synthetic construct
  misc_feature 1..20: note = Description of Artificial Sequence: Synthetic oligonucleotide
  misc_feature 1..20: note = Target: FXN; (+) strand; PAM type: YTN; PAM sequence: CTC
  source 1..20: mol_type = other DNA
ctgagtagctgggactatag

SEQ ID NO: 32409 - DNA, 20 bp, synthetic construct
  misc_feature 1..20: note = Description of Artificial Sequence: Synthetic oligonucleotide
  misc_feature 1..20: note = Target: FXN; (+) strand; PAM type: YTN; PAM sequence: CTG
  source 1..20: mol_type = other DNA
agtagctgggactataggcg

SEQ ID NO: 32410 - DNA, 20 bp, synthetic construct
  misc_feature 1..20: note = Description of Artificial Sequence: Synthetic oligonucleotide
  misc_feature 1..20: note = Target: FXN; (+) strand; PAM type: YTN; PAM sequence: CTG
  source 1..20: mol_type = other DNA
ggactataggcgtgcagtgc

SEQ ID NO: 32411 - DNA, 20 bp, synthetic construct
  misc_feature 1..20: note = Description of Artificial Sequence: Synthetic oligonucleotide
  misc_feature 1..20: note = Target: FXN; (+) strand; PAM type: YTN; PAM sequence: CTA
  source 1..20: mol_type = other DNA
taggcgtgcagtgccacacc

SEQ ID NO: 32412 - DNA, 20 bp, synthetic construct
  misc_feature 1..20: note = Description of Artificial Sequence: Synthetic oligonucleotide
  misc_feature 1..20: note = Target: FXN; (+) strand; PAM type: YTN; PAM sequence: CTA
  source 1..20: mol_type = other DNA
gctaatttttgtatttttag

SEQ ID NO: 32413 - DNA, 20 bp, synthetic construct
  misc_feature 1..20: note = Description of Artificial Sequence: Synthetic oligonucleotide
  misc_feature 1..20: note = Target: FXN; (+) strand; PAM type: YTN; PAM sequence: CTA
  source 1..20: mol_type = other DNA
atttttgtatttttagtaaa

SEQ ID NO: 32414 - DNA, 20 bp, synthetic construct
  misc_feature 1..20: note = Description of Artificial Sequence: Synthetic oligonucleotide
  misc_feature 1..20: note = Target: FXN; (+) strand; PAM type: YTN; PAM sequence: TTT
  source 1..20: mol_type = other DNA
ttgtatttttagtaaagacg

SEQ ID NO: 32415 - DNA, 20 bp, synthetic construct
  misc_feature 1..20: note = Description of Artificial Sequence: Synthetic oligonucleotide
  misc_feature 1..20: note = Target: FXN; (+) strand; PAM type: YTN; PAM sequence: TTT
  source 1..20: mol_type = other DNA
tgtatttttagtaaagacgg

SEQ ID NO: 32416 - DNA, 20 bp, synthetic construct
  misc_feature 1..20: note = Description of Artificial Sequence: Synthetic oligonucleotide
  misc_feature 1..20: note = Target: FXN; (+) strand; PAM type: YTN; PAM sequence: TTT
  source 1..20: mol_type = other DNA
gtatttttagtaaagacggg

SEQ ID NO: 32417 - DNA, 20 bp, synthetic construct
  misc_feature 1..20: note = Description of Artificial Sequence: Synthetic oligonucleotide
  misc_feature 1..20: note = Target: FXN; (+) strand; PAM type: YTN; PAM sequence: TTG
  source 1..20: mol_type = other DNA
tatttttagtaaagacgggg

SEQ ID NO: 32418 - DNA, 20 bp, synthetic construct
  misc_feature 1..20: note = Description of Artificial Sequence: Synthetic oligonucleotide
  misc_feature 1..20: note = Target: FXN; (+) strand; PAM type: YTN; PAM sequence: TTT
  source 1..20: mol_type = other DNA
ttagtaaagacggggtttca

SEQ ID NO: 32419 - DNA, 20 bp, synthetic construct
  misc_feature 1..20: note = Description of Artificial Sequence: Synthetic oligonucleotide
  misc_feature 1..20: note = Target: FXN; (+) strand; PAM type: YTN; PAM sequence: TTT
  source 1..20: mol_type = other DNA
tagtaaagacggggtttcac

SEQ ID NO: 32420 - DNA, 20 bp, synthetic construct
  misc_feature 1..20: note = Description of Artificial Sequence: Synthetic oligonucleotide
  misc_feature 1..20: note = Target: FXN; (+) strand; PAM type: YTN; PAM sequence: TTT
  source 1..20: mol_type = other DNA
agtaaagacggggtttcacc

SEQ ID NO: 32421 - DNA, 20 bp, synthetic construct
  misc_feature 1..20: note = Description of Artificial Sequence: Synthetic oligonucleotide
  misc_feature 1..20: note = Target: FXN; (+) strand; PAM type: YTN; PAM sequence: TTA
  source 1..20: mol_type = other DNA
gtaaagacggggtttcacca

SEQ ID NO: 32422 - DNA, 20 bp, synthetic construct
  misc_feature 1..20: note = Description of Artificial Sequence: Synthetic oligonucleotide
  misc_feature 1..20: note = Target: FXN; (+) strand; PAM type: YTN; PAM sequence: TTT
  source 1..20: mol_type = other DNA
caccatgttggccaggctgg

SEQ ID NO: 32423 - DNA, 20 bp, synthetic construct
  misc_feature 1..20: note = Description of Artificial Sequence: Synthetic oligonucleotide
  misc_feature 1..20: note = Target: FXN; (+) strand; PAM type: YTN; PAM sequence: TTC
  source 1..20: mol_type = other DNA
accatgttggccaggctggt

SEQ ID NO: 32424 - DNA, 20 bp, synthetic construct
  misc_feature 1..20: note = Description of Artificial Sequence: Synthetic oligonucleotide
  misc_feature 1..20: note = Target: FXN; (+) strand; PAM type: YTN; PAM sequence: TTG
  source 1..20: mol_type = other DNA
gccaggctggtcttgaactc

SEQ ID NO: 32425 - DNA, 20 bp, synthetic construct
  misc_feature 1..20: note = Description of Artificial Sequence: Synthetic oligonucleotide
  misc_feature 1..20: note = Target: FXN; (+) strand; PAM type: YTN; PAM sequence: CTG
  source 1..20: mol_type = other DNA
gtcttgaactcctgacctca

SEQ ID NO: 32426 - DNA, 20 bp, synthetic construct
  misc_feature 1..20: note = Description of Artificial Sequence: Synthetic oligonucleotide
  misc_feature 1..20: note = Target: FXN; (+) strand; PAM type: YTN; PAM sequence: CTT
  source 1..20: mol_type = other DNA
gaactcctgacctcagatga

SEQ ID NO: 32427 - DNA, 20 bp, synthetic construct
  misc_feature 1..20: note = Description of Artificial Sequence: Synthetic oligonucleotide
  misc_feature 1..20: note = Target: FXN; (+) strand; PAM type: YTN; PAM sequence: TTG
  source 1..20: mol_type = other DNA
aactcctgacctcagatgat

SEQ ID NO: 32428 - DNA, 20 bp, synthetic construct
  misc_feature 1..20: note = Description of Artificial Sequence: Synthetic oligonucleotide
  misc_feature 1..20: note = Target: FXN; (+) strand; PAM type: YTN; PAM sequence: CTC
  source 1..20: mol_type = other DNA
ctgacctcagatgatccgcc

SEQ ID NO: 32429 - DNA, 20 bp, synthetic construct
  misc_feature 1..20: note = Description of Artificial Sequence: Synthetic oligonucleotide
  misc_feature 1..20: note = Target: FXN; (+) strand; PAM type: YTN; PAM sequence: CTG
  source 1..20: mol_type = other DNA
acctcagatgatccgcccgc

SEQ ID NO: 32430 - DNA, 20 bp, synthetic construct
  misc_feature 1..20: note = Description of Artificial Sequence: Synthetic oligonucleotide
  misc_feature 1..20: note = Target: FXN; (+) strand; PAM type: YTN; PAM sequence: CTC
  source 1..20: mol_type = other DNA
agatgatccgcccgcctcgg

SEQ ID NO: 32431 - DNA, 20 bp, synthetic construct
  misc_feature 1..20: note = Description of Artificial Sequence: Synthetic oligonucleotide
  misc_feature 1..20: note = Target: FXN; (+) strand; PAM type: YTN; PAM sequence: CTC
  source 1..20: mol_type = other DNA
ggcctcccaaagtgctggga

SEQ ID NO: 32432 - DNA, 20 bp, synthetic construct
  misc_feature 1..20: note = Description of Artificial Sequence: Synthetic oligonucleotide
  misc_feature 1..20: note = Target: FXN; (+) strand; PAM type: YTN; PAM sequence: CTC
  source 1..20: mol_type = other DNA
ccaaagtgctgggattactg

SEQ ID NO: 32433 - DNA, 20 bp, synthetic construct
  misc_feature 1..20: note = Description of Artificial Sequence: Synthetic oligonucleotide
  misc_feature 1..20: note = Target: FXN; (+) strand; PAM type: YTN; PAM sequence: CTG
  source 1..20: mol_type = other DNA
ggattactggcatgagccac

SEQ ID NO: 32434 - DNA, 20 bp, synthetic construct
  misc_feature 1..20: note = Description of Artificial Sequence: Synthetic oligonucleotide
  misc_feature 1..20: note = Target: FXN; (+) strand; PAM type: YTN; PAM sequence: TTA
  source 1..20: mol_type = other DNA
ctggcatgagccactgcgcc

SEQ ID NO: 32435 - DNA, 20 bp, synthetic construct
  misc_feature 1..20: note = Description of Artificial Sequence: Synthetic oligonucleotide
  misc_feature 1..20: note = Target: FXN; (+) strand; PAM type: YTN; PAM sequence: CTG
  source 1..20: mol_type = other DNA
gcatgagccactgcgcccag

SEQ ID NO: 32436 - DNA, 20 bp, synthetic construct
  misc_feature 1..20: note = Description of Artificial Sequence: Synthetic oligonucleotide
  misc_feature 1..20: note = Target: FXN; (+) strand; PAM type: YTN; PAM sequence: CTG
  source 1..20: mol_type = other DNA
cgcccagcccagactcattt

SEQ ID NO: 32437 - DNA, 20 bp, synthetic construct
  misc_feature 1..20: note = Description of Artificial Sequence: Synthetic oligonucleotide
  misc_feature 1..20: note = Target: FXN; (+) strand; PAM type: YTN; PAM sequence: CTC
  source 1..20: mol_type = other DNA
atttttctttgagagtaggc

SEQ ID NO: 32438 - DNA, 20 bp, synthetic construct
  misc_feature 1..20: note = Description of Artificial Sequence: Synthetic oligonucleotide
  misc_feature 1..20: note = Target: FXN; (+) strand; PAM type: YTN; PAM sequence: TTT
  source 1..20: mol_type = other DNA
ttctttgagagtaggctttt

SEQ ID NO: 32439 - DNA, 20 bp, synthetic construct
  misc_feature 1..20: note = Description of Artificial Sequence: Synthetic oligonucleotide
  misc_feature 1..20: note = Target: FXN; (+) strand; PAM type: YTN; PAM sequence: TTT
  source 1..20: mol_type = other DNA
tctttgagagtaggcttttc

SEQ ID NO: 32440 - DNA, 20 bp, synthetic construct
  misc_feature 1..20: note = Description of Artificial Sequence: Synthetic oligonucleotide
  misc_feature 1..20: note = Target: FXN; (+) strand; PAM type: YTN; PAM sequence: TTT
  source 1..20: mol_type = other DNA
ctttgagagtaggcttttcc

SEQ ID NO: 32441 - DNA, 20 bp, synthetic construct
  misc_feature 1..20: note = Description of Artificial Sequence: Synthetic oligonucleotide
  misc_feature 1..20: note = Target: FXN; (+) strand; PAM type: YTN; PAM sequence: TTC
  source 1..20: mol_type = other DNA
tttgagagtaggcttttccc

SEQ ID NO: 32442 - DNA, 20 bp, synthetic construct
  misc_feature 1..20: note = Description of Artificial Sequence: Synthetic oligonucleotide
  misc_feature 1..20: note = Target: FXN; (+) strand; PAM type: YTN; PAM sequence: CTT
  source 1..20: mol_type = other DNA
tgagagtaggcttttcccaa

SEQ ID NO: 32443 - DNA, 20 bp, synthetic construct
  misc_feature 1..20: note = Description of Artificial Sequence: Synthetic oligonucleotide
  misc_feature 1..20: note = Target: FXN; (+) strand; PAM type: YTN; PAM sequence: TTT
  source 1..20: mol_type = other DNA
gagagtaggcttttcccaaa

SEQ ID NO: 32444 - DNA, 20 bp, synthetic construct
  misc_feature 1..20: note = Description of Artificial Sequence: Synthetic oligonucleotide
  misc_feature 1..20: note = Target: FXN; (+) strand; PAM type: YTN; PAM sequence: TTG
  source 1..20: mol_type = other DNA
agagtaggcttttcccaaaa

SEQ ID NO: 32445 - DNA, 20 bp, synthetic construct
  misc_feature 1..20: note = Description of Artificial Sequence: Synthetic oligonucleotide
  misc_feature 1..20: note = Target: FXN; (+) strand; PAM type: YTN; PAM sequence: CTT
  source 1..20: mol_type = other DNA
ttcccaaaagtaggcttctg

SEQ ID NO: 32446 - DNA, 20 bp, synthetic construct
  misc_feature 1..20: note = Description of Artificial Sequence: Synthetic oligonucleotide
  misc_feature 1..20: note = Target: FXN; (+) strand; PAM type: YTN; PAM sequence: TTT
  source 1..20: mol_type = other DNA
tcccaaaagtaggcttctga

SEQ ID NO: 32447 - DNA, 20 bp, synthetic construct
  misc_feature 1..20: note = Description of Artificial Sequence: Synthetic oligonucleotide
  misc_feature 1..20: note = Target: FXN; (+) strand; PAM type: YTN; PAM sequence: TTT
  source 1..20: mol_type = other DNA
cccaaaagtaggcttctgag

SEQ ID NO: 32448 - DNA, 20 bp, synthetic construct
  misc_feature 1..20: note = Description of Artificial Sequence: Synthetic oligonucleotide
  misc_feature 1..20: note = Target: FXN; (+) strand; PAM type: YTN; PAM sequence: TTC
  source 1..20: mol_type = other DNA
ccaaaagtaggcttctgagc

SEQ ID NO: 32449 - DNA, 20 bp, synthetic construct
  misc_feature 1..20: note = Description of Artificial Sequence: Synthetic oligonucleotide
  misc_feature 1..20: note = Target: FXN; (+) strand; PAM type: YTN; PAM sequence: CTT
  source 1..20: mol_type = other DNA
ctgagctattcactttcagg

SEQ ID NO: 32450 - DNA, 20 bp, synthetic construct
  misc_feature 1..20: note = Description of Artificial Sequence: Synthetic oligonucleotide
  misc_feature 1..20: note = Target: FXN; (+) strand; PAM type: YTN; PAM sequence: TTC
  source 1..20: mol_type = other DNA
tgagctattcactttcaggc

SEQ ID NO: 32451 - DNA, 20 bp, synthetic construct
  misc_feature 1..20: note = Description of Artificial Sequence: Synthetic oligonucleotide
  misc_feature 1..20: note = Target: FXN; (+) strand; PAM type: YTN; PAM sequence: CTG
  source 1..20: mol_type = other DNA
agctattcactttcaggcag

SEQ ID NO: 32452 - DNA, 20 bp, synthetic construct
  misc_feature 1..20: note = Description of Artificial Sequence: Synthetic oligonucleotide
  misc_feature 1..20: note = Target: FXN; (+) strand; PAM type: YTN; PAM sequence: CTA
  source 1..20: mol_type = other DNA
ttcactttcaggcagtccca

SEQ ID NO: 32453 - DNA, 20 bp, synthetic construct
  misc_feature 1..20: note = Description of Artificial Sequence: Synthetic oligonucleotide
  misc_feature 1..20: note = Target: FXN; (+) strand; PAM type: YTN; PAM sequence: TTC
  source 1..20: mol_type = other DNA
actttcaggcagtcccatgt

SEQ ID NO: 32454 - DNA, 20 bp, synthetic construct
  misc_feature 1..20: note = Description of Artificial Sequence: Synthetic oligonucleotide
  misc_feature 1..20: note = Target: FXN; (+) strand; PAM type: YTN; PAM sequence: CTT
  source 1..20: mol_type = other DNA
tcaggcagtcccatgtgcca

SEQ ID NO: 32455 - DNA, 20 bp, synthetic construct
  misc_feature 1..20: note = Description of Artificial Sequence: Synthetic oligonucleotide
  misc_feature 1..20: note = Target: FXN; (+) strand; PAM type: YTN; PAM sequence: TTT
  source 1..20: mol_type = other DNA
caggcagtcccatgtgccag

SEQ ID NO: 32456 - DNA, 20 bp, synthetic construct
  misc_feature 1..20: note = Description of Artificial Sequence: Synthetic oligonucleotide
  misc_feature 1..20: note = Target: FXN; (+) strand; PAM type: YTN; PAM sequence: TTC
  source 1..20: mol_type = other DNA
aggcagtcccatgtgccagg

SEQ ID NO: 32457 - DNA, 20 bp, synthetic construct
  misc_feature 1..20: note = Description of Artificial Sequence: Synthetic oligonucleotide
  misc_feature 1..20: note = Target: FXN; (+) strand; PAM type: YTN; PAM sequence: TTT
  source 1..20: mol_type = other DNA
cctccgtggatgggagtctc

SEQ ID NO: 32458 - DNA, 20 bp, synthetic construct
  misc_feature 1..20: note = Description of Artificial Sequence: Synthetic oligonucleotide
  misc_feature 1..20: note = Target: FXN; (+) strand; PAM type: YTN; PAM sequence: TTC
  source 1..20: mol_type = other DNA
ctccgtggatgggagtctca

SEQ ID NO: 32459 - DNA, 20 bp, synthetic construct
  misc_feature 1..20: note = Description of Artificial Sequence: Synthetic oligonucleotide
  misc_feature 1..20: note = Target: FXN; (+) strand; PAM type: YTN; PAM sequence: CTC
  source 1..20: mol_type = other DNA
cgtggatgggagtctcaggc

SEQ ID NO: 32460 - DNA, 20 bp, synthetic construct
  misc_feature 1..20: note = Description of Artificial Sequence: Synthetic oligonucleotide
  misc_feature 1..20: note = Target: FXN; (+) strand; PAM type: YTN; PAM sequence: CTC
  source 1..20: mol_type = other DNA
aggctgccttatctccttgc

SEQ ID NO: 32461 - DNA, 20 bp, synthetic construct
  misc_feature 1..20: note = Description of Artificial Sequence: Synthetic oligonucleotide
  misc_feature 1..20: note = Target: FXN; (+) strand; PAM type: YTN; PAM sequence: CTG
  source 1..20: mol_type = other DNA
ccttatctccttgcatgtcc

SEQ ID NO: 32462 - DNA, 20 bp, synthetic construct
  misc_feature 1..20: note = Description of Artificial Sequence: Synthetic oligonucleotide
  misc_feature 1..20: note = Target: FXN; (+) strand; PAM type: YTN; PAM sequence: CTT
  source 1..20: mol_type = other DNA
atctccttgcatgtccccat

SEQ ID NO: 32463 - DNA, 20 bp, synthetic construct
  misc_feature 1..20: note = Description of Artificial Sequence: Synthetic oligonucleotide
  misc_feature 1..20: note = Target: FXN; (+) strand; PAM type: YTN; PAM sequence: TTA
  source 1..20: mol_type = other DNA
tctccttgcatgtccccatg

SEQ ID NO: 32464 - DNA, 20 bp, synthetic construct
  misc_feature 1..20: note = Description of Artificial Sequence: Synthetic oligonucleotide
  misc_feature 1..20: note = Target: FXN; (+) strand; PAM type: YTN; PAM sequence: CTC
  source 1..20: mol_type = other DNA
cttgcatgtccccatgccca

SEQ ID NO: 32465 - DNA, 20 bp, synthetic construct
  misc_feature 1..20: note = Description of Artificial Sequence: Synthetic oligonucleotide
  misc_feature 1..20: note = Target: FXN; (+) strand; PAM type: YTN; PAM sequence: CTT
  source 1..20: mol_type = other DNA
gcatgtccccatgcccagct

SEQ ID NO: 32466 - DNA, 20 bp, synthetic construct
  misc_feature 1..20: note = Description of Artificial Sequence: Synthetic oligonucleotide
  misc_feature 1..20: note = Target: FXN; (+) strand; PAM type: YTN; PAM sequence: TTG
  source 1..20: mol_type = other DNA
catgtccccatgcccagctg

SEQ ID NO: 32467 - DNA, 20 bp, synthetic construct
  misc_feature 1..20: note = Description of Artificial Sequence: Synthetic oligonucleotide
  misc_feature 1..20: note = Target: FXN; (+) strand; PAM type: YTN; PAM sequence: CTG
  source 1..20: mol_type = other DNA
tctcagcctaagggcaggta

SEQ ID NO: 32468 - DNA, 20 bp, synthetic construct
  misc_feature 1..20: note = Description of Artificial Sequence: Synthetic oligonucleotide
  misc_feature 1..20: note = Target: FXN; (+) strand; PAM type: YTN; PAM sequence: CTC
  source 1..20: mol_type = other DNA
agcctaagggcaggtacctt

SEQ ID NO: 32469 - DNA, 20 bp, synthetic construct
  misc_feature 1..20: note = Description of Artificial Sequence: Synthetic oligonucleotide
  misc_feature 1..20: note = Target: FXN; (+) strand; PAM type: YTN; PAM sequence: CTA
  source 1..20: mol_type = other DNA
agggcaggtaccttgaagtc

SEQ ID NO: 32470 - DNA, 20 bp, synthetic construct
  misc_feature 1..20: note = Description of Artificial Sequence: Synthetic oligonucleotide
  misc_feature 1..20: note = Target: FXN; (+) strand; PAM type: YTN; PAM sequence: CTT
  source 1..20: mol_type = other DNA
gaagtcaagttaaacaataa

SEQ ID NO: 32471 - DNA, 20 bp, synthetic construct
  misc_feature 1..20: note = Description of Artificial Sequence: Synthetic oligonucleotide
  misc_feature 1..20: note = Target: FXN; (+) strand; PAM type: YTN; PAM sequence: TTG
  source 1..20: mol_type = other DNA
aagtcaagttaaacaataag

SEQ ID NO: 32472 - DNA, 20 bp, synthetic construct
  misc_feature 1..20: note = Description of Artificial Sequence: Synthetic oligonucleotide
  misc_feature 1..20: note = Target: FXN; (+) strand; PAM type: YTN; PAM sequence: TTA
  source 1..20: mol_type = other DNA
aacaataagattggagacca

SEQ ID NO: 32473 - DNA, 20 bp, synthetic construct
  misc_feature 1..20: note = Description of Artificial Sequence: Synthetic oligonucleotide
  misc_feature 1..20: note = Target: FXN; (+) strand; PAM type: YTN; PAM sequence: TTG
  source 1..20: mol_type = other DNA
gagaccagcaatgccctcag

SEQ ID NO: 32474 - DNA, 20 bp, synthetic construct
  misc_feature 1..20: note = Description of Artificial Sequence: Synthetic oligonucleotide
  misc_feature 1..20: note = Target: FXN; (+) strand; PAM type: YTN; PAM sequence: CTC
  source 1..20: mol_type = other DNA
agcctggtttttgcagcagg

SEQ ID NO: 32475 - DNA, 20 bp, synthetic construct
  misc_feature 1..20: note = Description of Artificial Sequence: Synthetic oligonucleotide
  misc_feature 1..20: note = Target: FXN; (+) strand; PAM type: YTN; PAM sequence: CTG
  source 1..20: mol_type = other DNA
gtttttgcagcaggactgag

SEQ ID NO: 32476 - DNA, 20 bp, synthetic construct
  misc_feature 1..20: note = Description of Artificial Sequence: Synthetic oligonucleotide
  misc_feature 1..20: note = Target: FXN; (+) strand; PAM type: YTN; PAM sequence: TTT
  source 1..20: mol_type = other DNA
ttgcagcaggactgagtccc

SEQ ID NO: 32477 - DNA, 20 bp, synthetic construct
  misc_feature 1..20: note = Description of Artificial Sequence: Synthetic oligonucleotide
  misc_feature 1..20: note = Target: FXN; (+) strand; PAM type: YTN; PAM sequence: TTT
  source 1..20: mol_type = other DNA
tgcagcaggactgagtccct

SEQ ID NO: 32478 - DNA, 20 bp, synthetic construct
  misc_feature 1..20: note = Description of Artificial Sequence: Synthetic oligonucleotide
  misc_feature 1..20: note = Target: FXN; (+) strand; PAM type: YTN; PAM sequence: TTT
  source 1..20: mol_type = other DNA
gcagcaggactgagtccctt

SEQ ID NO: 32479 - DNA, 20 bp, synthetic construct
  misc_feature 1..20: note = Description of Artificial Sequence: Synthetic oligonucleotide
  misc_feature 1..20: note = Target: FXN; (+) strand; PAM type: YTN; PAM sequence: TTG
  source 1..20: mol_type = other DNA
cagcaggactgagtcccttg

SEQ ID NO: 32480 - DNA, 20 bp, synthetic construct
  misc_feature 1..20: note = Description of Artificial Sequence: Synthetic oligonucleotide
  misc_feature 1..20: note = Target: FXN; (+) strand; PAM type: YTN; PAM sequence: CTG
  source 1..20: mol_type = other DNA
agtcccttgttttggctcaa

SEQ ID NO: 32481 - DNA, 20 bp, synthetic construct
  misc_feature 1..20: note = Description of Artificial Sequence: Synthetic oligonucleotide
  misc_feature 1..20: note = Target: FXN; (+) strand; PAM type: YTN; PAM sequence: CTT
  source 1..20: mol_type = other DNA
gttttggctcaatgggaagt

SEQ ID NO: 32482 - DNA, 20 bp, synthetic construct
  misc_feature 1..20: note = Description of Artificial Sequence: Synthetic oligonucleotide
  misc_feature 1..20: note = Target: FXN; (+) strand; PAM type: YTN; PAM sequence: TTG
  source 1..20: mol_type = other DNA
ttttggctcaatgggaagtc

SEQ ID NO: 32483 - DNA, 20 bp, synthetic construct
  misc_feature 1..20: note = Description of Artificial Sequence: Synthetic oligonucleotide
  misc_feature 1..20: note = Target: FXN; (+) strand; PAM type: YTN; PAM sequence: TTT
  source 1..20: mol_type = other DNA
tggctcaatgggaagtcttt

SEQ ID NO: 32484 - DNA, 20 bp, synthetic construct
  misc_feature 1..20: note = Description of Artificial Sequence: Synthetic oligonucleotide
  misc_feature 1..20: note = Target: FXN; (+) strand; PAM type: YTN; PAM sequence: TTT
  source 1..20: mol_type = other DNA
ggctcaatgggaagtctttg

SEQ ID NO: 32485 - DNA, 20 bp, synthetic construct
  misc_feature 1..20: note = Description of Artificial Sequence: Synthetic oligonucleotide
  misc_feature 1..20: note = Target: FXN; (+) strand; PAM type: YTN; PAM sequence: TTG
  source 1..20: mol_type = other DNA
gctcaatgggaagtctttgc

SEQ ID NO: 32486 - DNA, 20 bp, synthetic construct
  misc_feature 1..20: note = Description of Artificial Sequence: Synthetic oligonucleotide
  misc_feature 1..20: note = Target: FXN; (+) strand; PAM type: YTN; PAM sequence: CTC
  source 1..20: mol_type = other DNA
aatgggaagtctttgctgtt

SEQ ID NO: 32487 - DNA, 20 bp, synthetic construct
  misc_feature 1..20: note = Description of Artificial Sequence: Synthetic oligonucleotide
  misc_feature 1..20: note = Target: FXN; (+) strand; PAM type: YTN; PAM sequence: CTT
  source 1..20: mol_type = other DNA
tgctgttcaaagccttagct

SEQ ID NO: 32488 - DNA, 20 bp, synthetic construct
  misc_feature 1..20: note = Description of Artificial Sequence: Synthetic oligonucleotide
  misc_feature 1..20: note = Target: FXN; (+) strand; PAM type: YTN; PAM sequence: TTT
  source 1..20: mol_type = other DNA
gctgttcaaagccttagctt

SEQ ID NO: 32489 - DNA, 20 bp, synthetic construct
  misc_feature 1..20: note = Description of Artificial Sequence: Synthetic oligonucleotide
  misc_feature 1..20: note = Target: FXN; (+) strand; PAM type: YTN; PAM sequence: TTG
  source 1..20: mol_type = other DNA
ctgttcaaagccttagcttc

SEQ ID NO: 32490 - DNA, 20 bp, synthetic construct
  misc_feature 1..20: note = Description of Artificial Sequence: Synthetic oligonucleotide
  misc_feature 1..20: note = Target: FXN; (+) strand; PAM type: YTN; PAM sequence: CTG
  source 1..20: mol_type = other DNA
ttcaaagccttagcttctct

SEQ ID NO: 32491 - DNA, 20 bp, synthetic construct
  misc_feature 1..20: note = Description of Artificial Sequence: Synthetic oligonucleotide
  misc_feature 1..20: note = Target: FXN; (+) strand; PAM type: YTN; PAM sequence: TTC
  source 1..20: mol_type = other DNA
aaagccttagcttctctggc

SEQ ID NO: 32492 - DNA, 20 bp, synthetic construct
  misc_feature 1..20: note = Description of Artificial Sequence: Synthetic oligonucleotide
  misc_feature 1..20: note = Target: FXN; (+) strand; PAM type: YTN; PAM sequence: CTT
  source 1..20: mol_type = other DNA
agcttctctggctgagtgcg

SEQ ID NO: 32493 - DNA, 20 bp, synthetic construct
  misc_feature 1..20: note = Description of Artificial Sequence: Synthetic oligonucleotide
  misc_feature 1..20: note = Target: FXN; (+) strand; PAM type: YTN; PAM sequence: TTA
  source 1..20: mol_type = other DNA
gcttctctggctgagtgcgg

SEQ ID NO: 32494 - DNA, 20 bp, synthetic construct
  misc_feature 1..20: note = Description of Artificial Sequence: Synthetic oligonucleotide
  misc_feature 1..20: note = Target: FXN; (+) strand; PAM type: YTN; PAM sequence: CTT
  source 1..20: mol_type = other DNA
ctctggctgagtgcggtggc

SEQ ID NO: 32495 - DNA, 20 bp, synthetic construct
  misc_feature 1..20: note = Description of Artificial Sequence: Synthetic oligonucleotide
  misc_feature 1..20: note = Target: FXN; (+) strand; PAM type: YTN; PAM sequence: TTC
  source 1..20: mol_type = other DNA
tctggctgagtgcggtggct

SEQ ID NO: 32496 - DNA, 20 bp, synthetic construct
  misc_feature 1..20: note = Description of Artificial Sequence: Synthetic oligonucleotide
  misc_feature 1..20: note = Target: FXN; (+) strand; PAM type: YTN; PAM sequence: CTC
  source 1..20: mol_type = other DNA
tggctgagtgcggtggctca

SEQ ID NO: 32497 - DNA, 20 bp, synthetic construct
  misc_feature 1..20: note = Description of Artificial Sequence: Synthetic oligonucleotide
  misc_feature 1..20: note = Target: FXN; (+) strand; PAM type: YTN; PAM sequence: CTG
  source 1..20: mol_type = other DNA
gctgagtgcggtggctcacg

SEQ ID NO: 32498 - DNA, 20 bp, synthetic construct
  misc_feature 1..20: note = Description of Artificial Sequence: Synthetic oligonucleotide
  misc_feature 1..20: note = Target: FXN; (+) strand; PAM type: YTN; PAM sequence: CTG
  source 1..20: mol_type = other DNA
agtgcggtggctcacgcctg

SEQ ID NO: 32499 - DNA, 20 bp, synthetic construct
  misc_feature 1..20: note = Description of Artificial Sequence: Synthetic oligonucleotide
  misc_feature 1..20: note = Target: FXN; (+) strand; PAM type: YTN; PAM sequence: CTC
  source 1..20: mol_type = other DNA
acgcctgtcatcctagctct

SEQ ID NO: 32500 - DNA, 20 bp, synthetic construct
  misc_feature 1..20: note = Description of Artificial Sequence: Synthetic oligonucleotide
  misc_feature 1..20: note = Target: FXN; (+) strand; PAM type: YTN; PAM sequence: CTG
  source 1..20: mol_type = other DNA
tcatcctagctctttgggag

SEQ ID NO: 32501 - DNA, 20 bp, synthetic construct
  misc_feature 1..20: note = Description of Artificial Sequence: Synthetic oligonucleotide
  misc_feature 1..20: note = Target: FXN; (+) strand; PAM type: YTN; PAM sequence: CTA
  source 1..20: mol_type = other DNA
gctctttgggaggccgaggt

SEQ ID NO: 32502 - DNA, 20 bp, synthetic construct
  misc_feature 1..20: note = Description of Artificial Sequence: Synthetic oligonucleotide
  misc_feature 1..20: note = Target: FXN; (+) strand; PAM type: YTN; PAM sequence: CTC
  source 1..20: mol_type = other DNA
tttgggaggccgaggtgagc

SEQ ID NO: 32503 - DNA, 20 bp, synthetic construct
  misc_feature 1..20: note = Description of Artificial Sequence: Synthetic oligonucleotide
  misc_feature 1..20: note = Target: FXN; (+) strand; PAM type: YTN; PAM sequence: CTT
  source 1..20: mol_type = other DNA
tgggaggccgaggtgagcag

SEQ ID NO: 32504 - DNA, 20 bp, synthetic construct
  misc_feature 1..20: note = Description of Artificial Sequence: Synthetic oligonucleotide
  misc_feature 1..20: note = Target: FXN; (+) strand; PAM type: YTN; PAM sequence: TTT
  source 1..20: mol_type = other DNA
gggaggccgaggtgagcaga

SEQ ID NO: 32505 - DNA, 20 bp, synthetic construct
  misc_feature 1..20: note = Description of Artificial Sequence: Synthetic oligonucleotide
  misc_feature 1..20: note = Target: FXN; (+) strand; PAM type: YTN; PAM sequence: TTG
  source 1..20: mol_type = other DNA
ggaggccgaggtgagcagat

SEQ ID NO: 32506 - DNA, 20 bp, synthetic construct
  misc_feature 1..20: note = Description of Artificial Sequence: Synthetic oligonucleotide
  misc_feature 1..20: note = Target: FXN; (+) strand; PAM type: YTN; PAM sequence: CTG
  source 1..20: mol_type = other DNA
aggccaggagttcaagacca

SEQ ID NO: 32507 - DNA, 20 bp, synthetic construct
  misc_feature 1..20: note = Description of Artificial Sequence: Synthetic oligonucleotide
  misc_feature 1..20: note = Target: FXN; (+) strand; PAM type: YTN; PAM sequence: TTC
  source 1..20: mol_type = other DNA
aagaccagcctggccaacat

SEQ ID NO: 32508 - DNA, 20 bp, synthetic construct
  misc_feature 1..20: note = Description of Artificial Sequence: Synthetic oligonucleotide
  misc_feature 1..20: note = Target: FXN; (+) strand; PAM type: YTN; PAM sequence: CTG
  source 1..20: mol_type = other DNA
gccaacatggtgaaaccctg

SEQ ID NO: 32509 - DNA, 20 bp, synthetic construct
  misc_feature 1..20: note = Description of Artificial Sequence: Synthetic oligonucleotide
  misc_feature 1..20: note = Target: FXN; (+) strand; PAM type: YTN; PAM sequence: CTG
  source 1..20: mol_type = other DNA
tctctactaaaaatacaaaa

SEQ ID NO: 32510 - DNA, 20 bp, synthetic construct
  misc_feature 1..20: note = Description of Artificial Sequence: Synthetic oligonucleotide
  misc_feature 1..20: note = Target: FXN; (+) strand; PAM type: YTN; PAM sequence: CTC
  source 1..20: mol_type = other DNA
tactaaaaatacaaaaagtt

SEQ ID NO: 32511 - DNA, 20 bp, synthetic construct
  misc_feature 1..20: note = Description of Artificial Sequence: Synthetic oligonucleotide
  misc_feature 1..20: note = Target: FXN; (+) strand; PAM type: YTN; PAM sequence: CTA
  source 1..20: mol_type = other DNA
ctaaaaatacaaaaagttag

SEQ ID NO: 32512 - DNA, 20 bp, synthetic construct
  misc_feature 1..20: note = Description of Artificial Sequence: Synthetic oligonucleotide
  misc_feature 1..20: note = Target: FXN; (+) strand; PAM type: YTN; PAM sequence: CTA
  source 1..20: mol_type = other DNA
aaaatacaaaaagttagcca

SEQ ID NO: 32513 - DNA, 20 bp, synthetic construct
  misc_feature 1..20: note = Description of Artificial Sequence: Synthetic oligonucleotide
  misc_feature 1..20: note = Target: FXN; (+) strand; PAM type: YTN; PAM sequence: TTA
  source 1..20: mol_type = other DNA
gccaggcgtggtggcaggca

SEQ ID NO: 32514 - DNA, 20 bp, synthetic construct
  misc_feature 1..20: note = Description of Artificial Sequence: Synthetic oligonucleotide
  misc_feature 1..20: note = Target: FXN; (+) strand; PAM type: YTN; PAM sequence: CTG
  source 1..20: mol_type = other DNA
taatcccagctactcgggag

SEQ ID NO: 32515 - DNA, 20 bp, synthetic construct
  misc_feature 1..20: note = Description of Artificial Sequence: Synthetic oligonucleotide
  misc_feature 1..20: note = Target: FXN; (+) strand; PAM type: YTN; PAM sequence: CTA
  source 1..20: mol_type = other DNA
ctcgggagcctgaggcagga

SEQ ID NO: 32516 - DNA, 20 bp, synthetic construct
  misc_feature 1..20: note = Description of Artificial Sequence: Synthetic oligonucleotide
  misc_feature 1..20: note = Target: FXN; (+) strand; PAM type: YTN; PAM sequence: CTC
  source 1..20: mol_type = other DNA
gggagcctgaggcaggagaa

SEQ ID NO: 32517 - DNA, 20 bp, synthetic construct
  misc_feature 1..20: note = Description of Artificial Sequence: Synthetic oligonucleotide
  misc_feature 1..20: note = Target: FXN; (+) strand; PAM type: YTN; PAM sequence: CTG
  source 1..20: mol_type = other DNA
aggcaggagaatcgcttaaa

SEQ ID NO: 32518 - DNA, 20 bp, synthetic construct
  misc_feature 1..20: note = Description of Artificial Sequence: Synthetic oligonucleotide
  misc_feature 1..20: note = Target: FXN; (+) strand; PAM type: YTN; PAM sequence: CTT
  source 1..20: mol_type = other DNA
aaacccaggagatggaggct

SEQ ID NO: 32519 - DNA, 20 bp, synthetic construct
  misc_feature 1..20: note = Description of Artificial Sequence: Synthetic oligonucleotide
  misc_feature 1..20: note = Target: FXN; (+) strand; PAM type: YTN; PAM sequence: TTA
  source 1..20: mol_type = other DNA
aacccaggagatggaggctg

SEQ ID NO: 32520 - DNA, 20 bp, synthetic construct
  misc_feature 1..20: note = Description of Artificial Sequence: Synthetic oligonucleotide
  misc_feature 1..20: note = Target: FXN; (+) strand; PAM type: YTN; PAM sequence: CTG
  source 1..20: mol_type = other DNA
cagtgagctgagatcatgcc

SEQ ID NO: 32521 - DNA, 20 bp, synthetic construct
  misc_feature 1..20: note = Description of Artificial Sequence: Synthetic oligonucleotide
  misc_feature 1..20: note = Target: FXN; (+) strand; PAM type: YTN; PAM sequence: CTG
  source 1..20: mol_type = other DNA
agatcatgccattgcactcc

SEQ ID NO: 32522 - DNA, 20 bp, synthetic construct
  misc_feature 1..20: note = Description of Artificial Sequence: Synthetic oligonucleotide
  misc_feature 1..20: note = Target: FXN; (+) strand; PAM type: YTN; PAM sequence: TTG
  source 1..20: mol_type = other DNA
cactccagcctgggtaacga

SEQ ID NO: 32523 - DNA, 20 bp, synthetic construct
  misc_feature 1..20: note = Description of Artificial Sequence: Synthetic oligonucleotide
  misc_feature 1..20: note = Target: FXN; (+) strand; PAM type: YTN; PAM sequence: CTC
  source 1..20: mol_type = other DNA
cagcctgggtaacgagcgaa

SEQ ID NO: 32524 - DNA, 20 bp, synthetic construct
  misc_feature 1..20: note = Description of Artificial Sequence: Synthetic oligonucleotide
  misc_feature 1..20: note = Target: FXN; (+) strand; PAM type: YTN; PAM sequence: CTG
  source 1..20: mol_type = other DNA
ggtaacgagcgaaattccat

SEQ ID NO: 32525 - DNA, 20 bp, synthetic construct
  misc_feature 1..20: note = Description of Artificial Sequence: Synthetic oligonucleotide
  misc_feature 1..20: note = Target: FXN; (+) strand; PAM type: YTN; PAM sequence: TTC
  source 1..20: mol_type = other DNA
catctctaaaaaaaagaaaa

SEQ ID NO: 32526 - DNA, 20 bp, synthetic construct
  misc_feature 1..20: note = Description of Artificial Sequence: Synthetic oligonucleotide
  misc_feature 1..20: note = Target: FXN; (+) strand; PAM type: YTN; PAM sequence: CTC
  source 1..20: mol_type = other DNA
taaaaaaaagaaaaaaaaaa

SEQ ID NO: 32527 - DNA, 20 bp, synthetic construct
  misc_feature 1..20: note = Description of Artificial Sequence: Synthetic oligonucleotide
  misc_feature 1..20: note = Target: FXN; (+) strand; PAM type: YTN; PAM sequence: CTA
  source 1..20: mol_type = other DNA
aaaaaaagaaaaaaaaaagg

SEQ ID NO: 32528 - DNA, 20 bp, synthetic construct
  misc_feature 1..20: note = Description of Artificial Sequence: Synthetic oligonucleotide
  misc_feature 1..20: note = Target: FXN; (+) strand; PAM type: YTN; PAM sequence: CTT
  source 1..20: mol_type = other DNA
agattctccctttgactttc

SEQ ID NO: 32529 - DNA, 20 bp, synthetic construct
  misc_feature 1..20: note = Description of Artificial Sequence: Synthetic oligonucleotide
  misc_feature 1..20: note = Target: FXN; (+) strand; PAM type: YTN; PAM sequence: TTA
  source 1..20: mol_type = other DNA
gattctccctttgactttcc

SEQ ID NO: 32530 - DNA, 20 bp, synthetic construct
  misc_feature 1..20: note = Description of Artificial Sequence: Synthetic oligonucleotide
  misc_feature 1..20: note = Target: FXN; (+) strand; PAM type: YTN; PAM sequence: TTC
  source 1..20: mol_type = other DNA
tccctttgactttccacgtt

SEQ ID NO: 32531 - DNA, 20 bp, synthetic construct
  misc_feature 1..20: note = Description of Artificial Sequence: Synthetic oligonucleotide
  misc_feature 1..20: note = Target: FXN; (+) strand; PAM type: YTN; PAM sequence: CTC
  source 1..20: mol_type = other DNA
cctttgactttccacgtttg

SEQ ID NO: 32532 - DNA, 20 bp, synthetic construct
  misc_feature 1..20: note = Description of Artificial Sequence: Synthetic oligonucleotide
  misc_feature 1..20: note = Target: FXN; (+) strand; PAM type: YTN; PAM sequence: CTT
  source 1..20: mol_type = other DNA
tgactttccacgtttgtgca

SEQ ID NO: 32533 - DNA, 20 bp, synthetic construct
  misc_feature 1..20: note = Description of Artificial Sequence: Synthetic oligonucleotide
  misc_feature 1..20: note = Target: FXN; (+) strand; PAM type: YTN; PAM sequence: TTT
  source 1..20: mol_type = other DNA
gactttccacgtttgtgcag

SEQ ID NO: 32534 - DNA, 20 bp, synthetic construct
  misc_feature 1..20: note = Description of Artificial Sequence: Synthetic oligonucleotide
  misc_feature 1..20: note = Target: FXN; (+) strand; PAM type: YTN; PAM sequence: TTG
  source 1..20: mol_type = other DNA
actttccacgtttgtgcagc

SEQ ID NO: 32535 - DNA, 20 bp, synthetic construct
  misc_feature 1..20: note = Description of Artificial Sequence: Synthetic oligonucleotide
  misc_feature 1..20: note = Target: FXN; (+) strand; PAM type: YTN; PAM sequence: CTT
  source 1..20: mol_type = other DNA
tccacgtttgtgcagccttt

SEQ ID NO: 32536 - DNA, 20 bp, synthetic construct
  misc_feature 1..20: note = Description of Artificial Sequence: Synthetic oligonucleotide
  misc_feature 1..20: note = Target: FXN; (+) strand; PAM type: YTN; PAM sequence: TTT
  source 1..20: mol_type = other DNA
ccacgtttgtgcagcctttt

SEQ ID NO: 32537 - DNA, 20 bp, synthetic construct
  misc_feature 1..20: note = Description of Artificial Sequence: Synthetic oligonucleotide
  misc_feature 1..20: note = Target: FXN; (+) strand; PAM type: YTN; PAM sequence: TTC
  source 1..20: mol_type = other DNA
cacgtttgtgcagcctttta

SEQ ID NO: 32538 - DNA, 20 bp, synthetic construct
  misc_feature 1..20: note = Description of Artificial Sequence: Synthetic oligonucleotide
  misc_feature 1..20: note = Target: FXN; (+) strand; PAM type: YTN; PAM sequence: TTT
  source 1..20: mol_type = other DNA
gtgcagccttttatctccaa

SEQ ID NO: 32539 - DNA, 20 bp, synthetic construct
  misc_feature 1..20: note = Description of Artificial Sequence: Synthetic oligonucleotide
  misc_feature 1..20: note = Target: FXN; (+) strand; PAM type: YTN; PAM sequence: TTG
  source 1..20: mol_type = other DNA
tgcagccttttatctccaat

SEQ ID NO: 32540 - DNA, 20 bp, synthetic construct
  misc_feature 1..20: note = Description of Artificial Sequence: Synthetic oligonucleotide
  misc_feature 1..20: note = Target: FXN; (+) strand; PAM type: YTN; PAM sequence: CTT
  source 1..20: mol_type = other DNA
ttatctccaatgctccattt

SEQ ID NO: 32541 - DNA, 20 bp, synthetic construct
  misc_feature 1..20: note = Description of Artificial Sequence: Synthetic oligonucleotide
  misc_feature 1..20: note = Target: FXN; (+) strand; PAM type: YTN; PAM sequence: TTT
  source 1..20: mol_type = other DNA
tatctccaatgctccatttc

SEQ ID NO: 32542 - DNA, 20 bp, synthetic construct
  misc_feature 1..20: note = Description of Artificial Sequence: Synthetic oligonucleotide
  misc_feature 1..20: note = Target: FXN; (+) strand; PAM type: YTN; PAM sequence: TTT
  source 1..20: mol_type = other DNA
atctccaatgctccatttca

SEQ ID NO: 32543 - DNA, 20 bp, synthetic construct
  misc_feature 1..20: note = Description of Artificial Sequence: Synthetic oligonucleotide
  misc_feature 1..20: note = Target: FXN; (+) strand; PAM type: YTN; PAM sequence: TTA
  source 1..20: mol_type = other DNA
tctccaatgctccatttcat

SEQ ID NO: 32544 - DNA, 20 bp, synthetic construct
  misc_feature 1..20: note = Description of Artificial Sequence: Synthetic oligonucleotide
  misc_feature 1..20: note = Target: FXN; (+) strand; PAM type: YTN; PAM sequence: CTC
  source 1..20: mol_type = other DNA
caatgctccatttcattcca

SEQ ID NO: 32545 - DNA, 20 bp, synthetic construct
  misc_feature 1..20: note = Description of Artificial Sequence: Synthetic oligonucleotide
  misc_feature 1..20: note = Target: FXN; (+) strand; PAM type: YTN; PAM sequence: CTC
  source 1..20: mol_type = other DNA
catttcattccatctcctgg

SEQ ID NO: 32546 - DNA, 20 bp, synthetic construct
  misc_feature 1..20: note = Description of Artificial Sequence: Synthetic oligonucleotide
  misc_feature 1..20: note = Target: FXN; (+) strand; PAM type: YTN; PAM sequence: TTT
  source 1..20: mol_type = other DNA
cattccatctcctggcttat

SEQ ID NO: 32547 - DNA, 20 bp, synthetic construct
  misc_feature 1..20: note = Description of Artificial Sequence: Synthetic oligonucleotide
  misc_feature 1..20: note = Target: FXN; (+) strand; PAM type: YTN; PAM sequence: TTC
  source 1..20: mol_type = other DNA
attccatctcctggcttatt

SEQ ID NO: 32548 - DNA, 20 bp, synthetic construct
  misc_feature 1..20: note = Description of Artificial Sequence: Synthetic oligonucleotide
  misc_feature 1..20: note = Target: FXN; (+) strand; PAM type: YTN; PAM sequence: TTC
  source 1..20: mol_type = other DNA
catctcctggcttattcttt

SEQ ID NO: 32549 - DNA, 20 bp, synthetic construct
  misc_feature 1..20: note = Description of Artificial Sequence: Synthetic oligonucleotide
  misc_feature 1..20: note = Target: FXN; (+) strand; PAM type: YTN; PAM sequence: CTC
  source 1..20: mol_type = other DNA
ctggcttattcttttcttgt

SEQ ID NO: 32550 - DNA, 20 bp, synthetic construct
  misc_feature 1..20: note = Description of Artificial Sequence: Synthetic oligonucleotide
  misc_feature 1..20: note = Target: FXN; (+) strand; PAM type: YTN; PAM sequence: CTG
  source 1..20: mol_type = other DNA
gcttattcttttcttgtcac

SEQ ID NO: 32551 - DNA, 20 bp, synthetic construct
  misc_feature 1..20: note = Description of Artificial Sequence: Synthetic oligonucleotide
  misc_feature 1..20: note = Target: FXN; (+) strand; PAM type: YTN; PAM sequence: CTT
  source 1..20: mol_type = other DNA
attcttttcttgtcacatct

SEQ ID NO: 32552 - DNA, 20 bp, synthetic construct
  misc_feature 1..20: note = Description of Artificial Sequence: Synthetic oligonucleotide
  misc_feature 1..20: note = Target: FXN; (+) strand; PAM type: YTN; PAM sequence: TTA
  source 1..20: mol_type = other DNA
ttcttttcttgtcacatcta

SEQ ID NO: 32553 - DNA, 20 bp, synthetic construct
  misc_feature 1..20: note = Description of Artificial Sequence: Synthetic oligonucleotide
  misc_feature 1..20: note = Target: FXN; (+) strand; PAM type: YTN; PAM sequence: TTC
  source 1..20: mol_type = other DNA
ttttcttgtcacatctacta

SEQ ID NO: 32554 - DNA, 20 bp, synthetic construct
  misc_feature 1..20: note = Description of Artificial Sequence: Synthetic oligonucleotide
  misc_feature 1..20: note = Target: FXN; (+) strand; PAM type: YTN; PAM sequence: CTT
  source 1..20: mol_type = other DNA
ttcttgtcacatctactaaa

SEQ ID NO: 32555 - DNA, 20 bp, synthetic construct
  misc_feature 1..20: note = Description of Artificial Sequence: Synthetic oligonucleotide
  misc_feature 1..20: note = Target: FXN; (+) strand; PAM type: YTN; PAM sequence: TTT
  source 1..20: mol_type = other DNA
tcttgtcacatctactaaaa

SEQ ID NO: 32556 - DNA, 20 bp, synthetic construct
  misc_feature 1..20: note = Description of Artificial Sequence: Synthetic oligonucleotide
  misc_feature 1..20: note = Target: FXN; (+) strand; PAM type: YTN; PAM sequence: TTT
  source 1..20: mol_type = other DNA
cttgtcacatctactaaaag

SEQ ID NO: 32557 - DNA, 20 bp, synthetic construct
  misc_feature 1..20: note = Description of Artificial Sequence: Synthetic oligonucleotide
  misc_feature 1..20: note = Target: FXN; (+) strand; PAM type: YTN; PAM sequence: TTC
  source 1..20: mol_type = other DNA
ttgtcacatctactaaaagc

SEQ ID NO: 32558 - DNA, 20 bp, synthetic construct
  misc_feature 1..20: note = Description of Artificial Sequence: Synthetic oligonucleotide
  misc_feature 1..20: note = Target: FXN; (+) strand; PAM type: YTN; PAM sequence: CTT
  source 1..20: mol_type = other DNA
gtcacatctactaaaagcaa

SEQ ID NO: 32559 - DNA, 20 bp, synthetic construct
  misc_feature 1..20: note = Description of Artificial Sequence: Synthetic oligonucleotide
  misc_feature 1..20: note = Target: FXN; (+) strand; PAM type: YTN; PAM sequence: TTG
  source 1..20: mol_type = other DNA
tcacatctactaaaagcaac

SEQ ID NO: 32560 - DNA, 20 bp, synthetic construct
  misc_feature 1..20: note = Description of Artificial Sequence: Synthetic oligonucleotide
  misc_feature 1..20: note = Target: FXN; (+) strand; PAM type: YTN; PAM sequence: CTA
  source 1..20: mol_type = other DNA
ctaaaagcaacaagaagcca

SEQ ID NO: 32561 - DNA, 20 bp, synthetic construct
  misc_feature 1..20: note = Description of Artificial Sequence: Synthetic oligonucleotide
  misc_feature 1..20: note = Target: FXN; (+) strand; PAM type: YTN; PAM sequence: CTA
  source 1..20: mol_type = other DNA
aaagcaacaagaagccaccg

SEQ ID NO: 32562 - DNA, 20 bp, synthetic construct
  misc_feature 1..20: note = Description of Artificial Sequence: Synthetic oligonucleotide
  misc_feature 1..20: note = Target: FXN; (+) strand; PAM type: YTN; PAM sequence: TTC
  source 1..20: mol_type = other DNA
aggaacattctacctgtccc

SEQ ID NO: 32563 - DNA, 20 bp, synthetic construct
  misc_feature 1..20: note = Description of Artificial Sequence: Synthetic oligonucleotide
  misc_feature 1..20: note = Target: FXN; (+) strand; PAM type: YTN; PAM sequence: TTC
  source 1..20: mol_type = other DNA
tacctgtccccagagctata

SEQ ID NO: 32564 - DNA, 20 bp, synthetic construct
  misc_feature 1..20: note = Description of Artificial Sequence: Synthetic oligonucleotide
  misc_feature 1..20: note = Target: FXN; (+) strand; PAM type: YTN; PAM sequence: CTA
  source 1..20: mol_type = other DNA
cctgtccccagagctatatg

SEQ ID NO: 32565 - DNA, 20 bp, synthetic construct
  misc_feature 1..20: note = Description of Artificial Sequence: Synthetic oligonucleotide
  misc_feature 1..20: note = Target: FXN; (+) strand; PAM type: YTN; PAM sequence: CTG
  source 1..20: mol_type = other DNA
tccccagagctatatgctca

SEQ ID NO: 32566 - DNA, 20 bp, synthetic construct
  misc_feature 1..20: note = Description of Artificial Sequence: Synthetic oligonucleotide
  misc_feature 1..20: note = Target: FXN; (+) strand; PAM type: YTN; PAM sequence: CTA
  source 1..20: mol_type = other DNA
tatgctcagtaggcatacag

SEQ ID NO: 32567 - DNA, 20 bp, synthetic construct
  misc_feature 1..20: note = Description of Artificial Sequence: Synthetic oligonucleotide
  misc_feature 1..20: note = Target: FXN; (+) strand; PAM type: YTN; PAM sequence: CTC
  source 1..20: mol_type = other DNA
agtaggcatacagttggccc

SEQ ID NO: 32568 - DNA, 20 bp, synthetic construct
  misc_feature 1..20: note = Description of Artificial Sequence: Synthetic oligonucleotide
  misc_feature 1..20: note = Target: FXN; (+) strand; PAM type: YTN; PAM sequence: TTG
  source 1..20: mol_type = other DNA
gccctccaggttatctgaga

SEQ ID NO: 32569 - DNA, 20 bp, synthetic construct
  misc_feature 1..20: note = Description of Artificial Sequence: Synthetic oligonucleotide
  misc_feature 1..20: note = Target: FXN; (+) strand; PAM type: YTN; PAM sequence: CTC
  source 1..20: mol_type = other DNA
caggttatctgagactcaga

SEQ ID NO: 32570 - DNA, 20 bp, synthetic construct
  misc_feature 1..20: note = Description of Artificial Sequence: Synthetic oligonucleotide
  misc_feature 1..20: note = Target: FXN; (+) strand; PAM type: YTN; PAM sequence: TTA
  source 1..20: mol_type = other DNA
tctgagactcagatttccag

SEQ ID NO: 32571 - DNA, 20 bp, synthetic construct
  misc_feature 1..20: note = Description of Artificial Sequence: Synthetic oligonucleotide
  misc_feature 1..20: note = Target: FXN; (+) strand; PAM type: YTN; PAM sequence: CTG
  source 1..20: mol_type = other DNA
agactcagatttccagaggg

SEQ ID NO: 32572 - DNA, 20 bp, synthetic construct
  misc_feature 1..20: note = Description of Artificial Sequence: Synthetic oligonucleotide
  misc_feature 1..20: note = Target: FXN; (+) strand; PAM type: YTN; PAM sequence: CTC
  source 1..20: mol_type = other DNA
agatttccagagggctttgc

SEQ ID NO: 32573 - DNA, 20 bp, synthetic construct
  misc_feature 1..20: note = Description of Artificial Sequence: Synthetic oligonucleotide
  misc_feature 1..20: note = Target: FXN; (+) strand; PAM type: YTN; PAM sequence: TTT
  source 1..20: mol_type = other DNA
ccagagggctttgcatggct

SEQ ID NO: 32574 - DNA, 20 bp, synthetic construct
  misc_feature 1..20: note = Description of Artificial Sequence: Synthetic oligonucleotide
  misc_feature 1..20: note = Target: FXN; (+) strand; PAM type: YTN; PAM sequence: TTC
  source 1..20: mol_type = other DNA
cagagggctttgcatggctc

SEQ ID NO: 32575 - DNA, 20 bp, synthetic construct
  misc_feature 1..20: note = Description of Artificial Sequence: Synthetic oligonucleotide
  misc_feature 1..20: note = Target: FXN; (+) strand; PAM type: YTN; PAM sequence: CTT
  source 1..20: mol_type = other DNA
tgcatggctcacaaggtctg

SEQ ID NO: 32576 - DNA, 20 bp, synthetic construct
  misc_feature 1..20: note = Description of Artificial Sequence: Synthetic oligonucleotide
  misc_feature 1..20: note = Target: FXN; (+) strand; PAM type: YTN; PAM sequence: TTT
  source 1..20: mol_type = other DNA
gcatggctcacaaggtctga

SEQ ID NO: 32577 - DNA, 20 bp, synthetic construct
  misc_feature 1..20: note = Description of Artificial Sequence: Synthetic oligonucleotide
  misc_feature 1..20: note = Target: FXN; (+) strand; PAM type: YTN; PAM sequence: TTG
  source 1..20: mol_type = other DNA
catggctcacaaggtctgaa

SEQ ID NO: 32578 - DNA, 20 bp, synthetic construct
  misc_feature 1..20: note = Description of Artificial Sequence: Synthetic oligonucleotide
  misc_feature 1..20: note = Target: FXN; (+) strand; PAM type: YTN; PAM sequence: CTC
  source 1..20: mol_type = other DNA
acaaggtctgaagaacctct

SEQ ID NO: 32579 - DNA, 20 bp, synthetic construct
  misc_feature 1..20: note = Description of Artificial Sequence: Synthetic oligonucleotide
  misc_feature 1..20: note = Target: FXN; (+) strand; PAM type: YTN; PAM sequence: CTG
  source 1..20: mol_type = other DNA
aagaacctctgagcctcccg

SEQ ID NO: 32580 - DNA, 20 bp, synthetic construct
  misc_feature 1..20: note = Description of Artificial Sequence: Synthetic oligonucleotide
  misc_feature 1..20: note = Target: FXN; (+) strand; PAM type: YTN; PAM sequence: CTC
  source 1..20: mol_type = other DNA
tgagcctcccgcctgcggtg

SEQ ID NO: 32581 - DNA, 20 bp, synthetic construct
  misc_feature 1..20: note = Description of Artificial Sequence: Synthetic oligonucleotide
  misc_feature 1..20: note = Target: FXN; (+) strand; PAM type: YTN; PAM sequence: CTG
  source 1..20: mol_type = other DNA
agcctcccgcctgcggtgtc

SEQ ID NO: 32582 - DNA, 20 bp, synthetic construct
  misc_feature 1..20: note = Description of Artificial Sequence: Synthetic oligonucleotide
  misc_feature 1..20: note = Target: FXN; (+) strand; PAM type: YTN; PAM sequence: CTC
  source 1..20: mol_type = other DNA
ccgcctgcggtgtctgttca

SEQ ID NO: 32583 - DNA, 20 bp, synthetic construct
  misc_feature 1..20: note = Description of Artificial Sequence: Synthetic oligonucleotide
  misc_feature 1..20: note = Target: FXN; (+) strand; PAM type: YTN; PAM sequence: CTG
  source 1..20: mol_type = other DNA
cggtgtctgttcattgactt

SEQ ID NO: 32584 - DNA, 20 bp, synthetic construct
  misc_feature 1..20: note = Description of Artificial Sequence: Synthetic oligonucleotide
  misc_feature 1..20: note = Target: FXN; (+) strand; PAM type: YTN; PAM sequence: CTG
  source 1..20: mol_type = other DNA
ttcattgactttgccacagt

SEQ ID NO: 32585 - DNA, 20 bp, synthetic construct
  misc_feature 1..20: note = Description of Artificial Sequence: Synthetic oligonucleotide
  misc_feature 1..20: note = Target: FXN; (+) strand; PAM type: YTN; PAM sequence: TTC
  source 1..20: mol_type = other DNA
attgactttgccacagtctc

SEQ ID NO: 32586 - DNA, 20 bp, synthetic construct
  misc_feature 1..20: note = Description of Artificial Sequence: Synthetic oligonucleotide
  misc_feature 1..20: note = Target: FXN; (+) strand; PAM type: YTN; PAM sequence: TTG
  source 1..20: mol_type = other DNA
actttgccacagtctcaaag

SEQ ID NO: 32587 - DNA, 20 bp, synthetic construct
  misc_feature 1..20: note = Description of Artificial Sequence: Synthetic oligonucleotide
  misc_feature 1..20: note = Target: FXN; (+) strand; PAM type: YTN; PAM sequence: CTT
  source 1..20: mol_type = other DNA
tgccacagtctcaaagaggc

SEQ ID NO: 32588 - DNA, 20 bp, synthetic construct
  misc_feature 1..20: note = Description of Artificial Sequence: Synthetic oligonucleotide
  misc_feature 1..20: note = Target: FXN; (+) strand; PAM type: YTN; PAM sequence: TTT
  source 1..20: mol_type = other DNA
gccacagtctcaaagaggca

SEQ ID NO: 32589 - DNA, 20 bp, synthetic construct
  misc_feature 1..20: note = Description of Artificial Sequence: Synthetic oligonucleotide
  misc_feature 1..20: note = Target: FXN; (+) strand; PAM type: YTN; PAM sequence: TTG
  source 1..20: mol_type = other DNA
ccacagtctcaaagaggcac

SEQ ID NO: 32590 - DNA, 20 bp, synthetic construct
  misc_feature 1..20: note = Description of Artificial Sequence: Synthetic oligonucleotide
  misc_feature 1..20: note = Target: FXN; (+) strand; PAM type: YTN; PAM sequence: CTC
  source 1..20: mol_type = other DNA
aaagaggcactgcatgctgc

SEQ ID NO: 32591 - DNA, 20 bp, synthetic construct
  misc_feature 1..20: note = Description of Artificial Sequence: Synthetic oligonucleotide
  misc_feature 1..20: note = Target: FXN; (+) strand; PAM type: YTN; PAM sequence: CTG
  source 1..20: mol_type = other DNA
catgctgcatgtttgaggtt

SEQ ID NO: 32592 - DNA, 20 bp, synthetic construct
  misc_feature 1..20: note = Description of Artificial Sequence: Synthetic oligonucleotide
  misc_feature 1..20: note = Target: FXN; (+) strand; PAM type: YTN; PAM sequence: CTG
  source 1..20: mol_type = other DNA
catgtttgaggtttttgctt

SEQ ID NO: 32593 - DNA, 20 bp, synthetic construct
  misc_feature 1..20: note = Description of Artificial Sequence: Synthetic oligonucleotide
  misc_feature 1..20: note = Target: FXN; (+) strand; PAM type: YTN; PAM sequence: TTT
  source 1..20: mol_type = other DNA
gaggtttttgctttggtggc

SEQ ID NO: 32594 - DNA, 20 bp, synthetic construct
  misc_feature 1..20: note = Description of Artificial Sequence: Synthetic oligonucleotide
  misc_feature 1..20: note = Target: FXN; (+) strand; PAM type: YTN; PAM sequence: TTG
  source 1..20: mol_type = other DNA
aggtttttgctttggtggca

SEQ ID NO: 32595 - DNA, 20 bp, synthetic construct
  misc_feature 1..20: note = Description of Artificial Sequence: Synthetic oligonucleotide
  misc_feature 1..20: note = Target: FXN; (+) strand; PAM type: YTN; PAM sequence: TTT
  source 1..20: mol_type = other DNA
ttgctttggtggcatccatt

SEQ ID NO: 32596 - DNA, 20 bp, synthetic construct
  misc_feature 1..20: note = Description of Artificial Sequence: Synthetic oligonucleotide
  misc_feature 1..20: note = Target: FXN; (+) strand; PAM type: YTN; PAM sequence: TTT
  source 1..20: mol_type = other DNA
tgctttggtggcatccattt

SEQ ID NO: 32597 - DNA, 20 bp, synthetic construct
  misc_feature 1..20: note = Description of Artificial Sequence: Synthetic oligonucleotide
  misc_feature 1..20: note = Target: FXN; (+) strand; PAM type: YTN; PAM sequence: TTT
  source 1..20: mol_type = other DNA
gctttggtggcatccatttc

SEQ ID NO: 32598 - DNA, 20 bp, synthetic construct
  misc_feature 1..20: note = Description of Artificial Sequence: Synthetic oligonucleotide
  misc_feature 1..20: note = Target: FXN; (+) strand; PAM type: YTN; PAM sequence: TTG
  source 1..20: mol_type = other DNA
ctttggtggcatccatttcc

SEQ ID NO: 32599 - DNA, 20 bp, synthetic construct
  misc_feature 1..20: note = Description of Artificial Sequence: Synthetic oligonucleotide
  misc_feature 1..20: note = Target: FXN; (+) strand; PAM type: YTN; PAM sequence: CTT
  source 1..20: mol_type = other DNA
tggtggcatccatttccagc

SEQ ID NO: 32600 - DNA, 20 bp, synthetic construct
  misc_feature 1..20: note = Description of Artificial Sequence: Synthetic oligonucleotide
  misc_feature 1..20: note = Target: FXN; (+) strand; PAM type: YTN; PAM sequence: TTT
  source 1..20: mol_type = other DNA
ggtggcatccatttccagcc

SEQ ID NO: 32601 - DNA, 20 bp, synthetic construct
  misc_feature 1..20: note = Description of Artificial Sequence: Synthetic oligonucleotide
  misc_feature 1..20: note = Target: FXN; (+) strand; PAM type: YTN; PAM sequence: TTG
  source 1..20: mol_type = other DNA
gtggcatccatttccagcct

SEQ ID NO: 32602 - DNA, 20 bp, synthetic construct
  misc_feature 1..20: note = Description of Artificial Sequence: Synthetic oligonucleotide
  misc_feature 1..20: note = Target: FXN; (+) strand; PAM type: YTN; PAM sequence: TTT
  source 1..20: mol_type = other DNA
ccagcctcggcttccggcat

SEQ ID NO: 32603 - DNA, 20 bp, synthetic construct
  misc_feature 1..20: note = Description of Artificial Sequence: Synthetic oligonucleotide
  misc_feature 1..20: note = Target: FXN; (+) strand; PAM type: YTN; PAM sequence: TTC
  source 1..20: mol_type = other DNA
cagcctcggcttccggcatt

SEQ ID NO: 32604 - DNA, 20 bp, synthetic construct
  misc_feature 1..20: note = Description of Artificial Sequence: Synthetic oligonucleotide
  misc_feature 1..20: note = Target: FXN; (+) strand; PAM type: YTN; PAM sequence: CTC
  source 1..20: mol_type = other DNA
ggcttccggcattcctcccc

SEQ ID NO: 32605 - DNA, 20 bp, synthetic construct
  misc_feature 1..20: note = Description of Artificial Sequence: Synthetic oligonucleotide
  misc_feature 1..20: note = Target: FXN; (+) strand; PAM type: YTN; PAM sequence: CTT
  source 1..20: mol_type = other DNA
ccggcattcctcccccagca

SEQ ID NO: 32606 - DNA, 20 bp, synthetic construct
  misc_feature 1..20: note = Description of Artificial Sequence: Synthetic oligonucleotide
  misc_feature 1..20: note = Target: FXN; (+) strand; PAM type: YTN; PAM sequence: TTC
  source 1..20: mol_type = other DNA
cggcattcctcccccagcag

SEQ ID NO: 32607 - DNA, 20 bp, synthetic construct
  misc_feature 1..20: note = Description of Artificial Sequence: Synthetic oligonucleotide
  misc_feature 1..20: note = Target: FXN; (+) strand; PAM type: YTN; PAM sequence: TTC
  source 1..20: mol_type = other DNA
ctcccccagcagactctctg

SEQ ID NO: 32608 - DNA, 20 bp, synthetic construct
  misc_feature 1..20: note = Description of Artificial Sequence: Synthetic oligonucleotide
  misc_feature 1..20: note = Target: FXN; (+) strand; PAM type: YTN; PAM sequence: CTC
  source 1..20: mol_type = other DNA
ccccagcagactctctgctg

SEQ ID NO: 32609 - DNA, 20 bp, synthetic construct
  misc_feature 1..20: note = Description of Artificial Sequence: Synthetic oligonucleotide
  misc_feature 1..20: note = Target: FXN; (+) strand; PAM type: YTN; PAM sequence: CTC
  source 1..20: mol_type = other DNA
tctgctgctttccccttact

SEQ ID NO: 32610 - DNA, 20 bp, synthetic construct
  misc_feature 1..20: note = Description of Artificial Sequence: Synthetic oligonucleotide
  misc_feature 1..20: note = Target: FXN; (+) strand; PAM type: YTN; PAM sequence: CTC
  source 1..20: mol_type = other DNA
tgctgctttccccttactcc

SEQ ID NO: 32611 - DNA, 20 bp, synthetic construct
  misc_feature 1..20: note = Description of Artificial Sequence: Synthetic oligonucleotide
  misc_feature 1..20: note = Target: FXN; (+) strand; PAM type: YTN; PAM sequence: CTG
  source 1..20: mol_type = other DNA
ctgctttccccttactcctt

SEQ ID NO: 32612 - DNA, 20 bp, synthetic construct
  misc_feature 1..20: note = Description of Artificial Sequence: Synthetic oligonucleotide
  misc_feature 1..20: note = Target: FXN; (+) strand; PAM type: YTN; PAM sequence: CTG
  source 1..20: mol_type = other DNA
ctttccccttactccttctg

SEQ ID NO: 32613 - DNA, 20 bp, synthetic construct
  misc_feature 1..20: note = Description of Artificial Sequence: Synthetic oligonucleotide
  misc_feature 1..20: note = Target: FXN; (+) strand; PAM type: YTN; PAM sequence: CTT
  source 1..20: mol_type = other DNA
tccccttactccttctggca

SEQ ID NO: 32614 - DNA, 20 bp, synthetic construct
  misc_feature 1..20: note = Description of Artificial Sequence: Synthetic oligonucleotide
  misc_feature 1..20: note = Target: FXN; (+) strand; PAM type: YTN; PAM sequence: TTT
  source 1..20: mol_type = other DNA
ccccttactccttctggcag

SEQ ID NO: 32615 - DNA, 20 bp, synthetic construct
  misc_feature 1..20: note = Description of Artificial Sequence: Synthetic oligonucleotide
  misc_feature 1..20: note = Target: FXN; (+) strand; PAM type: YTN; PAM sequence: TTC
  source 1..20: mol_type = other DNA
cccttactccttctggcagt

SEQ ID NO: 32616 - DNA, 20 bp, synthetic construct
  misc_feature 1..20: note = Description of Artificial Sequence: Synthetic oligonucleotide
  misc_feature 1..20: note = Target: FXN; (+) strand; PAM type: YTN; PAM sequence: CTT
  source 1..20: mol_type = other DNA
actccttctggcagttctgg

SEQ ID NO: 32617 - DNA, 20 bp, synthetic construct
  misc_feature 1..20: note = Description of Artificial Sequence: Synthetic oligonucleotide
  misc_feature 1..20: note = Target: FXN; (+) strand; PAM type: YTN; PAM sequence: TTA
  source 1..20: mol_type = other DNA
ctccttctggcagttctggg

SEQ ID NO: 32618 - DNA, 20 bp, synthetic construct
  misc_feature 1..20: note = Description of Artificial Sequence: Synthetic oligonucleotide
  misc_feature 1..20: note = Target: FXN; (+) strand; PAM type: YTN; PAM sequence: CTC
  source 1..20: mol_type = other DNA
cttctggcagttctgggagg

SEQ ID NO: 32619 - DNA, 20 bp, synthetic construct
  misc_feature 1..20: note = Description of Artificial Sequence: Synthetic oligonucleotide
  misc_feature 1..20: note = Target: FXN; (+) strand; PAM type: YTN; PAM sequence: CTT
  source 1..20: mol_type = other DNA
ctggcagttctgggaggttg

SEQ ID NO: 32620 - DNA, 20 bp, synthetic construct
  misc_feature 1..20: note = Description of Artificial Sequence: Synthetic oligonucleotide
  misc_feature 1..20: note = Target: FXN; (+) strand; PAM type: YTN; PAM sequence: TTC
  source 1..20: mol_type = other DNA
tggcagttctgggaggttgc

SEQ ID NO: 32621 - DNA, 20 bp, synthetic construct
  misc_feature 1..20: note = Description of Artificial Sequence: Synthetic oligonucleotide
  misc_feature 1..20: note = Target: FXN; (+) strand; PAM type: YTN; PAM sequence: CTG
  source 1..20: mol_type = other DNA
gcagttctgggaggttgcat

SEQ ID NO: 32622 - DNA, 20 bp, synthetic construct
  misc_feature 1..20: note = Description of Artificial Sequence: Synthetic oligonucleotide
  misc_feature 1..20: note = Target: FXN; (+) strand; PAM type: YTN; PAM sequence: TTC
  source 1..20: mol_type = other DNA
tgggaggttgcatagggccc

SEQ ID NO: 32623 - DNA, 20 bp, synthetic construct
  misc_feature 1..20: note = Description of Artificial Sequence: Synthetic oligonucleotide
  misc_feature 1..20: note = Target: FXN; (+) strand; PAM type: YTN; PAM sequence: CTG
  source 1..20: mol_type = other DNA
ggaggttgcatagggccctt

SEQ ID NO: 32624 - DNA, 20 bp, synthetic construct
  misc_feature 1..20: note = Description of Artificial Sequence: Synthetic oligonucleotide
  misc_feature 1..20: note = Target: FXN; (+) strand; PAM type: YTN; PAM sequence: TTG
  source 1..20: mol_type = other DNA
catagggcccttgcaggatg

SEQ ID NO: 32625 - DNA, 20 bp, synthetic construct
  misc_feature 1..20: note = Description of Artificial Sequence: Synthetic oligonucleotide
  misc_feature 1..20: note = Target: FXN; (+) strand; PAM type: YTN; PAM sequence: CTT
  source 1..20: mol_type = other DNA
gcaggatgccccaagtccag

SEQ ID NO: 32626 - DNA, 20 bp, synthetic construct
  misc_feature 1..20: note = Description of Artificial Sequence: Synthetic oligonucleotide
  misc_feature 1..20: note = Target: FXN; (+) strand; PAM type: YTN; PAM sequence: TTG
  source 1..20: mol_type = other DNA
caggatgccccaagtccagc

SEQ ID NO: 32627 - DNA, 20 bp, synthetic construct
  misc_feature 1..20: note = Description of Artificial Sequence: Synthetic oligonucleotide
  misc_feature 1..20: note = Target: FXN; (+) strand; PAM type: YTN; PAM sequence: CTG
  source 1..20: mol_type = other DNA
cctctggcctctgggaagca

SEQ ID NO: 32628 - DNA, 20 bp, synthetic construct
  misc_feature 1..20: note = Description of Artificial Sequence: Synthetic oligonucleotide
  misc_feature 1..20: note = Target: FXN; (+) strand; PAM type: YTN; PAM sequence: CTC
  source 1..20: mol_type = other DNA
tggcctctgggaagcacacc

SEQ ID NO: 32629 - DNA, 20 bp, synthetic construct
  misc_feature 1..20: note = Description of Artificial Sequence: Synthetic oligonucleotide
  misc_feature 1..20: note = Target: FXN; (+) strand; PAM type: YTN; PAM sequence: CTG
  source 1..20: mol_type = other DNA
gcctctgggaagcacaccct

SEQ ID NO: 32630 - DNA, 20 bp, synthetic construct
  misc_feature 1..20: note = Description of Artificial Sequence: Synthetic oligonucleotide
  misc_feature 1..20: note = Target: FXN; (+) strand; PAM type: YTN; PAM sequence: CTC
  source 1..20: mol_type = other DNA
tgggaagcacacccttgacc

SEQ ID NO: 32631 - DNA, 20 bp, synthetic construct
  misc_feature 1..20: note = Description of Artificial Sequence: Synthetic oligonucleotide
  misc_feature 1..20: note = Target: FXN; (+) strand; PAM type: YTN; PAM sequence: CTG
  source 1..20: mol_type = other DNA
ggaagcacacccttgacctg

SEQ ID NO: 32632 - DNA, 20 bp, synthetic construct
  misc_feature 1..20: note = Description of Artificial Sequence: Synthetic oligonucleotide
  misc_feature 1..20: note = Target: FXN; (+) strand; PAM type: YTN; PAM sequence: CTT
  source 1..20: mol_type = other DNA
gacctgccatgtgtaggaag

SEQ ID NO: 32633 - DNA, 20 bp, synthetic construct
  misc_feature 1..20: note = Description of Artificial Sequence: Synthetic oligonucleotide
  misc_feature 1..20: note = Target: FXN; (+) strand; PAM type: YTN; PAM sequence: TTG
  source 1..20: mol_type = other DNA
acctgccatgtgtaggaaga

SEQ ID NO: 32634 - DNA, 20 bp, synthetic construct
  misc_feature 1..20: note = Description of Artificial Sequence: Synthetic oligonucleotide
  misc_feature 1..20: note = Target: FXN; (+) strand; PAM type: YTN; PAM sequence: CTG
  source 1..20: mol_type = other DNA
ccatgtgtaggaagacagcc

SEQ ID NO: 32635 - DNA, 20 bp, synthetic construct
  misc_feature 1..20: note = Description of Artificial Sequence: Synthetic oligonucleotide
  misc_feature 1..20: note = Target: FXN; (+) strand; PAM type: YTN; PAM sequence: CTT
  source 1..20: mol_type = other DNA
ctgccagggcccaactctgc

SEQ ID NO: 32636 - DNA, 20 bp, synthetic construct
  misc_feature 1..20: note = Description of Artificial Sequence: Synthetic oligonucleotide
  misc_feature 1..20: note = Target: FXN; (+) strand; PAM type: YTN; PAM sequence: TTC
  source 1..20: mol_type = other DNA
tgccagggcccaactctgcc

SEQ ID NO: 32637 - DNA, 20 bp, synthetic construct
  misc_feature 1..20: note = Description of Artificial Sequence: Synthetic oligonucleotide
  misc_feature 1..20: note = Target: FXN; (+) strand; PAM type: YTN; PAM sequence: CTG
  source 1..20: mol_type = other DNA
ccagggcccaactctgccgg

SEQ ID NO: 32638 - DNA, 20 bp, synthetic construct
  misc_feature 1..20: note = Description of Artificial Sequence: Synthetic oligonucleotide
  misc_feature 1..20: note = Target: FXN; (+) strand; PAM type: YTN; PAM sequence: CTC
  source 1..20: mol_type = other DNA
tgccggcaggtagcaccttc

SEQ ID NO: 32639 - DNA, 20 bp, synthetic construct
  misc_feature 1..20: note = Description of Artificial Sequence: Synthetic oligonucleotide
  misc_feature 1..20: note = Target: FXN; (+) strand; PAM type: YTN; PAM sequence: CTG
  source 1..20: mol_type = other DNA
ccggcaggtagcaccttcca

SEQ ID NO: 32640 - DNA, 20 bp, synthetic construct
  misc_feature 1..20: note = Description of Artificial Sequence: Synthetic oligonucleotide
  misc_feature 1..20: note = Target: FXN; (+) strand; PAM type: YTN; PAM sequence: CTT
  source 1..20: mol_type = other DNA
ccaacctcttcactttggac

SEQ ID NO: 32641 - DNA, 20 bp, synthetic construct
  misc_feature 1..20: note = Description of Artificial Sequence: Synthetic oligonucleotide
  misc_feature 1..20: note = Target: FXN; (+) strand; PAM type: YTN; PAM sequence: TTC
  source 1..20: mol_type = other DNA
caacctcttcactttggact

SEQ ID NO: 32642 - DNA, 20 bp, synthetic construct
  misc_feature 1..20: note = Description of Artificial Sequence: Synthetic oligonucleotide
  misc_feature 1..20: note = Target: FXN; (+) strand; PAM type: YTN; PAM sequence: CTC
  source 1..20: mol_type = other DNA
ttcactttggactttataac

SEQ ID NO: 32643 - DNA, 20 bp, synthetic construct
  misc_feature 1..20: note = Description of Artificial Sequence: Synthetic oligonucleotide
  misc_feature 1..20: note = Target: FXN; (+) strand; PAM type: YTN; PAM sequence: CTT
  source 1..20: mol_type = other DNA
cactttggactttataactg

SEQ ID NO: 32644 - DNA, 20 bp, synthetic construct
  misc_feature 1..20: note = Description of Artificial Sequence: Synthetic oligonucleotide
  misc_feature 1..20: note = Target: FXN; (+) strand; PAM type: YTN; PAM sequence: TTC
  source 1..20: mol_type = other DNA
actttggactttataactgt

SEQ ID NO: 32645 - DNA, 20 bp, synthetic construct
  misc_feature 1..20: note = Description of Artificial Sequence: Synthetic oligonucleotide
  misc_feature 1..20: note = Target: FXN; (+) strand; PAM type: YTN; PAM sequence: CTT
  source 1..20: mol_type = other DNA
tggactttataactgtcagg

SEQ ID NO: 32646 - DNA, 20 bp, synthetic construct
  misc_feature 1..20: note = Description of Artificial Sequence: Synthetic oligonucleotide
  misc_feature 1..20: note = Target: FXN; (+) strand; PAM type: YTN; PAM sequence: TTT
  source 1..20: mol_type = other DNA
ggactttataactgtcaggt

SEQ ID NO: 32647 - DNA, 20 bp, synthetic construct
  misc_feature 1..20: note = Description of Artificial Sequence: Synthetic oligonucleotide
  misc_feature 1..20: note = Target: FXN; (+) strand; PAM type: YTN; PAM sequence: TTG
  source 1..20: mol_type = other DNA
gactttataactgtcaggta

SEQ ID NO: 32648 - DNA, 20 bp, synthetic construct
  misc_feature 1..20: note = Description of Artificial Sequence: Synthetic oligonucleotide
  misc_feature 1..20: note = Target: FXN; (+) strand; PAM type: YTN; PAM sequence: CTT
  source 1..20: mol_type = other DNA
tataactgtcaggtataaag

SEQ ID NO: 32649 - DNA, 20 bp, synthetic construct
  misc_feature 1..20: note = Description of Artificial Sequence: Synthetic oligonucleotide
  misc_feature 1..20: note = Target: FXN; (+) strand; PAM type: YTN; PAM sequence: TTT
  source 1..20: mol_type = other DNA
ataactgtcaggtataaagt

SEQ ID NO: 32650 - DNA, 20 bp, synthetic construct
  misc_feature 1..20: note = Description of Artificial Sequence: Synthetic oligonucleotide
  misc_feature 1..20: note = Target: FXN; (+) strand; PAM type: YTN; PAM sequence: TTA
  source 1..20: mol_type = other DNA
taactgtcaggtataaagtc

SEQ ID NO: 32651 - DNA, 20 bp, synthetic construct
  misc_feature 1..20: note = Description of Artificial Sequence: Synthetic oligonucleotide
  misc_feature 1..20: note = Target: FXN; (+) strand; PAM type: YTN; PAM sequence: CTG
  source 1..20: mol_type = other DNA
tcaggtataaagtcggttgt

SEQ ID NO: 32652 - DNA, 20 bp, synthetic construct
  misc_feature 1..20: note = Description of Artificial Sequence: Synthetic oligonucleotide
  misc_feature 1..20: note = Target: FXN; (+) strand; PAM type: YTN; PAM sequence: TTG
  source 1..20: mol_type = other DNA
tgtccttacgtttctcaaat

SEQ ID NO: 32653 - DNA, 20 bp, synthetic construct
  misc_feature 1..20: note = Description of Artificial Sequence: Synthetic oligonucleotide
  misc_feature 1..20: note = Target: FXN; (+) strand; PAM type: YTN; PAM sequence: CTT
  source 1..20: mol_type = other DNA
acgtttctcaaattcttcaa

SEQ ID NO: 32654 - DNA, 20 bp, synthetic construct
  misc_feature 1..20: note = Description of Artificial Sequence: Synthetic oligonucleotide
  misc_feature 1..20: note = Target: FXN; (+) strand; PAM type: YTN; PAM sequence: TTA
  source 1..20: mol_type = other DNA
cgtttctcaaattcttcaag

SEQ ID NO: 32655 - DNA, 20 bp, synthetic construct
  misc_feature 1..20: note = Description of Artificial Sequence: Synthetic oligonucleotide
  misc_feature 1..20: note = Target: FXN; (+) strand; PAM type: YTN; PAM sequence: TTT
  source 1..20: mol_type = other DNA
ctcaaattcttcaagacacg

SEQ ID NO: 32656 - DNA, 20 bp, synthetic construct
  misc_feature 1..20: note = Description of Artificial Sequence: Synthetic oligonucleotide
  misc_feature 1..20: note = Target: FXN; (+) strand; PAM type: YTN; PAM sequence: TTC
  source 1..20: mol_type = other DNA
tcaaattcttcaagacacgt

SEQ ID NO: 32657 - DNA, 20 bp, synthetic construct
  misc_feature 1..20: note = Description of Artificial Sequence: Synthetic oligonucleotide
  misc_feature 1..20: note = Target: FXN; (+) strand; PAM type: YTN; PAM sequence: CTC
  source 1..20: mol_type = other DNA
aaattcttcaagacacgtca

SEQ ID NO: 32658 - DNA, 20 bp, synthetic construct
  misc_feature 1..20: note = Description of Artificial Sequence: Synthetic oligonucleotide
  misc_feature 1..20: note = Target: FXN; (+) strand; PAM type: YTN; PAM sequence: TTC
  source 1..20: mol_type = other DNA
ttcaagacacgtcaaccagc

SEQ ID NO: 32659 - DNA, 20 bp, synthetic construct
  misc_feature 1..20: note = Description of Artificial Sequence: Synthetic oligonucleotide
  misc_feature 1..20: note = Target: FXN; (+) strand; PAM type: YTN; PAM sequence: CTT
  source 1..20: mol_type = other DNA
caagacacgtcaaccagcct

SEQ ID NO: 32660 - DNA, 20 bp, synthetic construct
  misc_feature 1..20: note = Description of Artificial Sequence: Synthetic oligonucleotide
  misc_feature 1..20: note = Target: FXN; (+) strand; PAM type: YTN; PAM sequence: TTC
  source 1..20: mol_type = other DNA
aagacacgtcaaccagcctc

SEQ ID NO: 32661 - DNA, 20 bp, synthetic construct
  misc_feature 1..20: note = Description of Artificial Sequence: Synthetic oligonucleotide
  misc_feature 1..20: note = Target: FXN; (+) strand; PAM type: YTN; PAM sequence: CTC
  source 1..20: mol_type = other DNA
tcctacgcattctctccagc

SEQ ID NO: 32662 - DNA, 20 bp, synthetic construct
  misc_feature 1..20: note = Description of Artificial Sequence: Synthetic oligonucleotide
  misc_feature 1..20: note = Target: FXN; (+) strand; PAM type: YTN; PAM sequence: CTC
  source 1..20: mol_type = other DNA
ctacgcattctctccagctc

SEQ ID NO: 32663 - DNA, 20 bp, synthetic construct
  misc_feature 1..20: note = Description of Artificial Sequence: Synthetic oligonucleotide
  misc_feature 1..20: note = Target: FXN; (+) strand; PAM type: YTN; PAM sequence: CTA
  source 1..20: mol_type = other DNA
cgcattctctccagctcagt

SEQ ID NO: 32664 - DNA, 20 bp, synthetic construct
  misc_feature 1..20: note = Description of Artificial Sequence: Synthetic oligonucleotide
  misc_feature 1..20: note = Target: FXN; (+) strand; PAM type: YTN; PAM sequence: TTC
  source 1..20: mol_type = other DNA
tctccagctcagtctcaaaa

SEQ ID NO: 32665 - DNA, 20 bp, synthetic construct
  misc_feature 1..20: note = Description of Artificial Sequence: Synthetic oligonucleotide
  misc_feature 1..20: note = Target: FXN; (+) strand; PAM type: YTN; PAM sequence: CTC
  source 1..20: mol_type = other DNA
tccagctcagtctcaaaaca

SEQ ID NO: 32666 - DNA, 20 bp, synthetic construct
  misc_feature 1..20: note = Description of Artificial Sequence: Synthetic oligonucleotide
  misc_feature 1..20: note = Target: FXN; (+) strand; PAM type: YTN; PAM sequence: CTC
  source 1..20: mol_type = other DNA
cagctcagtctcaaaacaca

SEQ ID NO: 32667 - DNA, 20 bp, synthetic construct
  misc_feature 1..20: note = Description of Artificial Sequence: Synthetic oligonucleotide
  misc_feature 1..20: note = Target: FXN; (+) strand; PAM type: YTN; PAM sequence: CTC
  source 1..20: mol_type = other DNA
agtctcaaaacacacccttt

SEQ ID NO: 32668 - DNA, 20 bp, synthetic construct
  misc_feature 1..20: note = Description of Artificial Sequence: Synthetic oligonucleotide
  misc_feature 1..20: note = Target: FXN; (+) strand; PAM type: YTN; PAM sequence: CTC
  source 1..20: mol_type = other DNA
aaaacacaccctttctctcc

SEQ ID NO: 32669 - DNA, 20 bp, synthetic construct
  misc_feature 1..20: note = Description of Artificial Sequence: Synthetic oligonucleotide
  misc_feature 1..20: note = Target: FXN; (+) strand; PAM type: YTN; PAM sequence: CTT
  source 1..20: mol_type = other DNA
tctctccagctcactctcaa

SEQ ID NO: 32670 - DNA, 20 bp, synthetic construct
  misc_feature 1..20: note = Description of Artificial Sequence: Synthetic oligonucleotide
  misc_feature 1..20: note = Target: FXN; (+) strand; PAM type: YTN; PAM sequence: TTT
  source 1..20: mol_type = other DNA
ctctccagctcactctcaaa

SEQ ID NO: 32671 - DNA, 20 bp, synthetic construct
  misc_feature 1..20: note = Description of Artificial Sequence: Synthetic oligonucleotide
  misc_feature 1..20: note = Target: FXN; (+) strand; PAM type: YTN; PAM sequence: TTC
  source 1..20: mol_type = other DNA
tctccagctcactctcaaaa

SEQ ID NO: 32672 - DNA, 20 bp, synthetic construct
  misc_feature 1..20: note = Description of Artificial Sequence: Synthetic oligonucleotide
  misc_feature 1..20: note = Target: FXN; (+) strand; PAM type: YTN; PAM sequence: CTC
  source 1..20: mol_type = other DNA
tccagctcactctcaaaaca

SEQ ID NO: 32673 - DNA, 20 bp, synthetic construct
  misc_feature 1..20: note = Description of Artificial Sequence: Synthetic oligonucleotide
  misc_feature 1..20: note = Target: FXN; (+) strand; PAM type: YTN; PAM sequence: CTC
  source 1..20: mol_type = other DNA
cagctcactctcaaaacaca

SEQ ID NO: 32674 - DNA, 20 bp, synthetic construct
  misc_feature 1..20: note = Description of Artificial Sequence: Synthetic oligonucleotide
  misc_feature 1..20: note = Target: FXN; (+) strand; PAM type: YTN; PAM sequence: CTC
  source 1..20: mol_type = other DNA
actctcaaaacacaccctat

SEQ ID NO: 32675 - DNA, 20 bp, synthetic construct
  misc_feature 1..20: note = Description of Artificial Sequence: Synthetic oligonucleotide
  misc_feature 1..20: note = Target: FXN; (+) strand; PAM type: YTN; PAM sequence: CTC
  source 1..20: mol_type = other DNA
tcaaaacacaccctatcagg

SEQ ID NO: 32676 - DNA, 20 bp, synthetic construct
  misc_feature 1..20: note = Description of Artificial Sequence: Synthetic oligonucleotide
  misc_feature 1..20: note = Target: FXN; (+) strand; PAM type: YTN; PAM sequence: CTC
  source 1..20: mol_type = other DNA
aaaacacaccctatcaggcc

SEQ ID NO: 32677 - DNA, 20 bp, synthetic construct
  misc_feature 1..20: note = Description of Artificial Sequence: Synthetic oligonucleotide
  misc_feature 1..20: note = Target: FXN; (+) strand; PAM type: YTN; PAM sequence: CTA
  source 1..20: mol_type = other DNA
tcaggccaaccactcttttt

SEQ ID NO: 32678 - DNA, 20 bp, synthetic construct
  misc_feature 1..20: note = Description of Artificial Sequence: Synthetic oligonucleotide
  misc_feature 1..20: note = Target: FXN; (+) strand; PAM type: YTN; PAM sequence: CTC
  source 1..20: mol_type = other DNA
tttttaaaggacagctcctc

SEQ ID NO: 32679 - DNA, 20 bp, synthetic construct
  misc_feature 1..20: note = Description of Artificial Sequence: Synthetic oligonucleotide
  misc_feature 1..20: note = Target: FXN; (+) strand; PAM type: YTN; PAM sequence: CTT
  source 1..20: mol_type = other DNA
tttaaaggacagctcctcac

SEQ ID NO: 32680 - DNA, 20 bp, synthetic construct
  misc_feature 1..20: note = Description of Artificial Sequence: Synthetic oligonucleotide
  misc_feature 1..20: note = Target: FXN; (+) strand; PAM type: YTN; PAM sequence: TTT
  source 1..20: mol_type = other DNA
ttaaaggacagctcctcacc

SEQ ID NO: 32681 - DNA, 20 bp, synthetic construct
  misc_feature 1..20: note = Description of Artificial Sequence: Synthetic oligonucleotide
  misc_feature 1..20: note = Target: FXN; (+) strand; PAM type: YTN; PAM sequence: TTT
  source 1..20: mol_type = other DNA
taaaggacagctcctcacca

SEQ ID NO: 32682 - DNA, 20 bp, synthetic construct
  misc_feature 1..20: note = Description of Artificial Sequence: Synthetic oligonucleotide
  misc_feature 1..20: note = Target: FXN; (+) strand; PAM type: YTN; PAM sequence: TTT
  source 1..20: mol_type = other DNA
aaaggacagctcctcaccaa

SEQ ID NO: 32683 - DNA, 20 bp, synthetic construct
  misc_feature 1..20: note = Description of Artificial Sequence: Synthetic oligonucleotide
  misc_feature 1..20: note = Target: FXN; (+) strand; PAM type: YTN; PAM sequence: TTA
  source 1..20: mol_type = other DNA
aaggacagctcctcaccaat

SEQ ID NO: 32684 - DNA, 20 bp, synthetic construct
  misc_feature 1..20: note = Description of Artificial Sequence: Synthetic oligonucleotide
  misc_feature 1..20: note = Target: FXN; (+) strand; PAM type: YTN; PAM sequence: CTC
  source 1..20: mol_type = other DNA
ctcaccaatccagtcaggta

SEQ ID NO: 32685 - DNA, 20 bp, synthetic construct
  misc_feature 1..20: note = Description of Artificial Sequence: Synthetic oligonucleotide
  misc_feature 1..20: note = Target: FXN; (+) strand; PAM type: YTN; PAM sequence: CTC
  source 1..20: mol_type = other DNA
accaatccagtcaggtagcc

SEQ ID NO: 32686 - DNA, 20 bp, synthetic construct
  misc_feature 1..20: note = Description of Artificial Sequence: Synthetic oligonucleotide
  misc_feature 1..20: note = Target: FXN; (+) strand; PAM type: YTN; PAM sequence: CTT
  source 1..20: mol_type = other DNA
ccccacattgtatcctggaa

SEQ ID NO: 32687 - DNA, 20 bp, synthetic construct
  misc_feature 1..20: note = Description of Artificial Sequence: Synthetic oligonucleotide
  misc_feature 1..20: note = Target: FXN; (+) strand; PAM type: YTN; PAM sequence: TTC
  source 1..20: mol_type = other DNA
cccacattgtatcctggaag

SEQ ID NO: 32688 - DNA, 20 bp, synthetic construct
  misc_feature 1..20: note = Description of Artificial Sequence: Synthetic oligonucleotide
  misc_feature 1..20: note = Target: FXN; (+) strand; PAM type: YTN; PAM sequence: TTG
  source 1..20: mol_type = other DNA
tatcctggaagtgggtgatg

SEQ ID NO: 32689 - DNA, 20 bp, synthetic construct
  misc_feature 1..20: note = Description of Artificial Sequence: Synthetic oligonucleotide
  misc_feature 1..20: note = Target: FXN; (+) strand; PAM type: YTN; PAM sequence: CTG
  source 1..20: mol_type = other DNA
gaagtgggtgatggactggg

SEQ ID NO: 32690 - DNA, 20 bp, synthetic construct
  misc_feature 1..20: note = Description of Artificial Sequence: Synthetic oligonucleotide
  misc_feature 1..20: note = Target: FXN; (+) strand; PAM type: YTN; PAM sequence: CTG
  source 1..20: mol_type = other DNA
ggtggggaagagggtcatat

SEQ ID NO: 32691 - DNA, 20 bp, synthetic construct
  misc_feature 1..20: note = Description of Artificial Sequence: Synthetic oligonucleotide
  misc_feature 1..20: note = Target: FXN; (+) strand; PAM type: YTN; PAM sequence: CTG
  source 1..20: mol_type = other DNA
tatgtcttacagtaattgtc

SEQ ID NO: 32692 - DNA, 20 bp, synthetic construct
  misc_feature 1..20: note = Description of Artificial Sequence: Synthetic oligonucleotide
  misc_feature 1..20: note = Target: FXN; (+) strand; PAM type: YTN; PAM sequence: CTT
  source 1..20: mol_type = other DNA
acagtaattgtctagcagcc

SEQ ID NO: 32693 - DNA, 20 bp, synthetic construct
  misc_feature 1..20: note = Description of Artificial Sequence: Synthetic oligonucleotide
  misc_feature 1..20: note = Target: FXN; (+) strand; PAM type: YTN; PAM sequence: TTA
  source 1..20: mol_type = other DNA
cagtaattgtctagcagccc

SEQ ID NO: 32694 - DNA, 20 bp, synthetic construct
  misc_feature 1..20: note = Description of Artificial Sequence: Synthetic oligonucleotide
  misc_feature 1..20: note = Target: FXN; (+) strand; PAM type: YTN; PAM sequence: TTG
  source 1..20: mol_type = other DNA
tctagcagcccctggtgtct

SEQ ID NO: 32695 - DNA, 20 bp, synthetic construct
  misc_feature 1..20: note = Description of Artificial Sequence: Synthetic oligonucleotide
  misc_feature 1..20: note = Target: FXN; (+) strand; PAM type: YTN; PAM sequence: CTA
  source 1..20: mol_type = other DNA
gcagcccctggtgtcttact

SEQ ID NO: 32696 - DNA, 20 bp, synthetic construct
  misc_feature 1..20: note = Description of Artificial Sequence: Synthetic oligonucleotide
  misc_feature 1..20: note = Target: FXN; (+) strand; PAM type: YTN; PAM sequence: CTG
  source 1..20: mol_type = other DNA
gtgtcttactttaggccccc

SEQ ID NO: 32697 - DNA, 20 bp, synthetic construct
  misc_feature 1..20: note = Description of Artificial Sequence: Synthetic oligonucleotide
  misc_feature 1..20: note = Target: FXN; (+) strand; PAM type: YTN; PAM sequence: CTT
  source 1..20: mol_type = other DNA
actttaggccccctggaaac

SEQ ID NO: 32698 - DNA, 20 bp, synthetic construct
  misc_feature 1..20: note = Description of Artificial Sequence: Synthetic oligonucleotide
  misc_feature 1..20: note = Target: FXN; (+) strand; PAM type: YTN; PAM sequence: TTA
  source 1..20: mol_type = other DNA
ctttaggccccctggaaact

SEQ ID NO: 32699 - DNA, 20 bp, synthetic construct
  misc_feature 1..20: note = Description of Artificial Sequence: Synthetic oligonucleotide
  misc_feature 1..20: note = Target: FXN; (+) strand; PAM type: YTN; PAM sequence: CTT
  source 1..20: mol_type = other DNA
taggccccctggaaactttc

SEQ ID NO: 32700 - DNA, 20 bp, synthetic construct
  misc_feature 1..20: note = Description of Artificial Sequence: Synthetic oligonucleotide
  misc_feature 1..20: note = Target: FXN; (+) strand; PAM type: YTN; PAM sequence: TTT
  source 1..20: mol_type = other DNA
aggccccctggaaactttca

SEQ ID NO: 32701 - DNA, 20 bp, synthetic construct
  misc_feature 1..20: note = Description of Artificial Sequence: Synthetic oligonucleotide
  misc_feature 1..20: note = Target: FXN; (+) strand; PAM type: YTN; PAM sequence: TTA
  source 1..20: mol_type = other DNA
ggccccctggaaactttcag

SEQ ID NO: 32702 - DNA, 20 bp, synthetic construct
  misc_feature 1..20: note = Description of Artificial Sequence: Synthetic oligonucleotide
  misc_feature 1..20: note = Target: FXN; (+) strand; PAM type: YTN; PAM sequence: CTG
  source 1..20: mol_type = other DNA
gaaactttcagatagtggag

SEQ ID NO: 32703 - DNA, 20 bp, synthetic construct
  misc_feature 1..20: note = Description of Artificial Sequence: Synthetic oligonucleotide
  misc_feature 1..20: note = Target: FXN; (+) strand; PAM type: YTN; PAM sequence: CTT
  source 1..20: mol_type = other DNA
tcagatagtggagttgtctg

SEQ ID NO: 32704 - DNA, 20 bp, synthetic construct
  misc_feature 1..20: note = Description of Artificial Sequence: Synthetic oligonucleotide
  misc_feature 1..20: note = Target: FXN; (+) strand; PAM type: YTN; PAM sequence: TTT
  source 1..20: mol_type = other DNA
cagatagtggagttgtctga

SEQ ID NO: 32705 - DNA, 20 bp, synthetic construct
  misc_feature 1..20: note = Description of Artificial Sequence: Synthetic oligonucleotide
  misc_feature 1..20: note = Target: FXN; (+) strand; PAM type: YTN; PAM sequence: TTC
  source 1..20: mol_type = other DNA
agatagtggagttgtctgat

SEQ ID NO: 32706 - DNA, 20 bp, synthetic construct
  misc_feature 1..20: note = Description of Artificial Sequence: Synthetic oligonucleotide
  misc_feature 1..20: note = Target: FXN; (+) strand; PAM type: YTN; PAM sequence: TTG
  source 1..20: mol_type = other DNA
tctgatacatatcttataac

SEQ ID NO: 32707 - DNA, 20 bp, synthetic construct
  misc_feature 1..20: note = Description of Artificial Sequence: Synthetic oligonucleotide
  misc_feature 1..20: note = Target: FXN; (+) strand; PAM type: YTN; PAM sequence: CTG
  source 1..20: mol_type = other DNA
atacatatcttataacctac

SEQ ID NO: 32708 - DNA, 20 bp, synthetic construct
  misc_feature 1..20: note = Description of Artificial Sequence: Synthetic oligonucleotide
  misc_feature 1..20: note = Target: FXN; (+) strand; PAM type: YTN; PAM sequence: CTT
  source 1..20: mol_type = other DNA
ataacctacagatattaata

SEQ ID NO: 32709 - DNA, 20 bp, synthetic construct
  misc_feature 1..20: note = Description of Artificial Sequence: Synthetic oligonucleotide
  misc_feature 1..20: note = Target: FXN; (+) strand; PAM type: YTN; PAM sequence: TTA
  source 1..20: mol_type = other DNA
taacctacagatattaatat

SEQ ID NO: 32710 - DNA, 20 bp, synthetic construct
  misc_feature 1..20: note = Description of Artificial Sequence: Synthetic oligonucleotide
  misc_feature 1..20: note = Target: FXN; (+) strand; PAM type: YTN; PAM sequence: CTA
  source 1..20: mol_type = other DNA
cagatattaatatatcctca

SEQ ID NO: 32711 - DNA, 20 bp, synthetic construct
  misc_feature 1..20: note = Description of Artificial Sequence: Synthetic oligonucleotide
  misc_feature 1..20: note = Target: FXN; (+) strand; PAM type: YTN; PAM sequence: TTA
  source 1..20: mol_type = other DNA
atatatcctcacaggggcac

SEQ ID NO: 32712 - DNA, 20 bp, synthetic construct
  misc_feature 1..20: note = Description of Artificial Sequence: Synthetic oligonucleotide
  misc_feature 1..20: note = Target: FXN; (+) strand; PAM type: YTN; PAM sequence: CTC
  source 1..20: mol_type = other DNA
acaggggcacaaaagctctt

SEQ ID NO: 32713 - DNA, 20 bp, synthetic construct
  misc_feature 1..20: note = Description of Artificial Sequence: Synthetic oligonucleotide
  misc_feature 1..20: note = Target: FXN; (+) strand; PAM type: YTN; PAM sequence: CTC
  source 1..20: mol_type = other DNA
ttacaaggatgtttattata

SEQ ID NO: 32714 - DNA, 20 bp, synthetic construct
  misc_feature 1..20: note = Description of Artificial Sequence: Synthetic oligonucleotide
  misc_feature 1..20: note = Target: FXN; (+) strand; PAM type: YTN; PAM sequence: CTT
  source 1..20: mol_type = other DNA
acaaggatgtttattataat

SEQ ID NO: 32715 - DNA, 20 bp, synthetic construct
  misc_feature 1..20: note = Description of Artificial Sequence: Synthetic oligonucleotide
  misc_feature 1..20: note = Target: FXN; (+) strand; PAM type: YTN; PAM sequence: TTA
  source 1..20: mol_type = other DNA
caaggatgtttattataata

SEQ ID NO: 32716 - DNA, 20 bp, synthetic construct
  misc_feature 1..20: note = Description of Artificial Sequence: Synthetic oligonucleotide
  misc_feature 1..20: note = Target: FXN; (+) strand; PAM type: YTN; PAM sequence: TTT
  source 1..20: mol_type = other DNA
attataataatatttttatt

SEQ ID NO: 32717 - DNA, 20 bp, synthetic construct
  misc_feature 1..20: note = Description of Artificial Sequence: Synthetic oligonucleotide
  misc_feature 1..20: note = Target: FXN; (+) strand; PAM type: YTN; PAM sequence: TTA
  source 1..20: mol_type = other DNA
ttataataatatttttattg

SEQ ID NO: 32718 - DNA, 20 bp, synthetic construct
  misc_feature 1..20: note = Description of Artificial Sequence: Synthetic oligonucleotide
  misc_feature 1..20: note = Target: FXN; (+) strand; PAM type: YTN; PAM sequence: TTA
  source 1..20: mol_type = other DNA
taataatatttttattgtta

SEQ ID NO: 32719 - DNA, 20 bp, synthetic construct
  misc_feature 1..20: note = Description of Artificial Sequence: Synthetic oligonucleotide
  misc_feature 1..20: note = Target: FXN; (+) strand; PAM type: YTN; PAM sequence: TTT
  source 1..20: mol_type = other DNA
ttattgttataatttacatg

SEQ ID NO: 32720 - DNA, 20 bp, synthetic construct
  misc_feature 1..20: note = Description of Artificial Sequence: Synthetic oligonucleotide
  misc_feature 1..20: note = Target: FXN; (+) strand; PAM type: YTN; PAM sequence: TTT
  source 1..20: mol_type = other DNA
tattgttataatttacatgc

SEQ ID NO: 32721 - DNA, 20 bp, synthetic construct
  misc_feature 1..20: note = Description of Artificial Sequence: Synthetic oligonucleotide
  misc_feature 1..20: note = Target: FXN; (+) strand; PAM type: YTN; PAM sequence: TTT
  source 1..20: mol_type = other DNA
attgttataatttacatgcc

SEQ ID NO: 32722 - DNA, 20 bp, synthetic construct
  misc_feature 1..20: note = Description of Artificial Sequence: Synthetic oligonucleotide
  misc_feature 1..20: note = Target: FXN; (+) strand; PAM type: YTN; PAM sequence: TTA
  source 1..20: mol_type = other DNA
ttgttataatttacatgcca

SEQ ID NO: 32723 - DNA, 20 bp, synthetic construct
  misc_feature 1..20: note = Description of Artificial Sequence: Synthetic oligonucleotide
  misc_feature 1..20: note = Target: FXN; (+) strand; PAM type: YTN; PAM sequence: TTG
  source 1..20: mol_type = other DNA
ttataatttacatgccataa

SEQ ID NO: 32724 - DNA, 20 bp, synthetic construct
  misc_feature 1..20: note = Description of Artificial Sequence: Synthetic oligonucleotide
  misc_feature 1..20: note = Target: FXN; (+) strand; PAM type: YTN; PAM sequence: TTA
  source 1..20: mol_type = other DNA
taatttacatgccataaaac

SEQ ID NO: 32725 - DNA, 20 bp, synthetic construct
  misc_feature 1..20: note = Description of Artificial Sequence: Synthetic oligonucleotide
  misc_feature 1..20: note = Target: FXN; (+) strand; PAM type: YTN; PAM sequence: TTT
  source 1..20: mol_type = other DNA
acatgccataaaactaacca

SEQ ID NO: 32726 - DNA, 20 bp, synthetic construct
  misc_feature 1..20: note = Description of Artificial Sequence: Synthetic oligonucleotide
  misc_feature 1..20: note = Target: FXN; (+) strand; PAM type: YTN; PAM sequence: TTA
  source 1..20: mol_type = other DNA
catgccataaaactaaccat

SEQ ID NO: 32727 - DNA, 20 bp, synthetic construct
  misc_feature 1..20: note = Description of Artificial Sequence: Synthetic oligonucleotide
  misc_feature 1..20: note = Target: FXN; (+) strand; PAM type: YTN; PAM sequence: CTA
  source 1..20: mol_type = other DNA
accattttaaaatgtataat

SEQ ID NO: 32728 - DNA, 20 bp, synthetic construct
  misc_feature 1..20: note = Description of Artificial Sequence: Synthetic oligonucleotide
  misc_feature 1..20: note = Target: FXN; (+) strand; PAM type: YTN; PAM sequence: TTT
  source 1..20: mol_type = other DNA
taaaatgtataatgcaaggg

SEQ ID NO: 32729 - DNA, 20 bp, synthetic construct
  misc_feature 1..20: note = Description of Artificial Sequence: Synthetic oligonucleotide
  misc_feature 1..20: note = Target: FXN; (+) strand; PAM type: YTN; PAM sequence: TTT
  source 1..20: mol_type = other DNA
aaaatgtataatgcaagggt

SEQ ID NO: 32730 - DNA, 20 bp, synthetic construct
  misc_feature 1..20: note = Description of Artificial Sequence: Synthetic oligonucleotide
  misc_feature 1..20: note = Target: FXN; (+) strand; PAM type: YTN; PAM sequence: TTA
  source 1..20: mol_type = other DNA
aaatgtataatgcaagggtt

SEQ ID NO: 32731 - DNA, 20 bp, synthetic construct
  misc_feature 1..20: note = Description of Artificial Sequence: Synthetic oligonucleotide
  misc_feature 1..20: note = Target: FXN; (+) strand; PAM type: YTN; PAM sequence: TTT
  source 1..20: mol_type = other DNA
ttagtatattcacaagattg

SEQ ID NO: 32732 - DNA, 20 bp, synthetic construct
  misc_feature 1..20: note = Description of Artificial Sequence: Synthetic oligonucleotide
  misc_feature 1..20: note = Target: FXN; (+) strand; PAM type: YTN; PAM sequence: TTT
  source 1..20: mol_type = other DNA
tagtatattcacaagattgt

SEQ ID NO: 32733 - DNA, 20 bp, synthetic construct
  misc_feature 1..20: note = Description of Artificial Sequence: Synthetic oligonucleotide
  misc_feature 1..20: note = Target: FXN; (+) strand; PAM type: YTN; PAM sequence: TTT
  source 1..20: mol_type = other DNA
agtatattcacaagattgtg

SEQ ID NO: 32734 - DNA, 20 bp, synthetic construct
  misc_feature 1..20: note = Description of Artificial Sequence: Synthetic oligonucleotide
  misc_feature 1..20: note = Target: FXN; (+) strand; PAM type: YTN; PAM sequence: TTA
  source 1..20: mol_type = other DNA
gtatattcacaagattgtgc

SEQ ID NO: 32735 - DNA, 20 bp, synthetic construct
  misc_feature 1..20: note = Description of Artificial Sequence: Synthetic oligonucleotide
  misc_feature 1..20: note = Target: FXN; (+) strand; PAM type: YTN; PAM sequence: TTC
  source 1..20: mol_type = other DNA
acaagattgtgcagctgtca

SEQ ID NO: 32736 - DNA, 20 bp, synthetic construct
  misc_feature 1..20: note = Description of Artificial Sequence: Synthetic oligonucleotide
  misc_feature 1..20: note = Target: FXN; (+) strand; PAM type: YTN; PAM sequence: TTG
  source 1..20: mol_type = other DNA
tgcagctgtcactactaatt

SEQ ID NO: 32737 - DNA, 20 bp, synthetic construct
  misc_feature 1..20: note = Description of Artificial Sequence: Synthetic oligonucleotide
  misc_feature 1..20: note = Target: FXN; (+) strand; PAM type: YTN; PAM sequence: CTG
  source 1..20: mol_type = other DNA
tcactactaattccagaaca

SEQ ID NO: 32738 - DNA, 20 bp, synthetic construct
  misc_feature 1..20: note = Description of Artificial Sequence: Synthetic oligonucleotide
  misc_feature 1..20: note = Target: FXN; (+) strand; PAM type: YTN; PAM sequence: CTA
  source 1..20: mol_type = other DNA
ctaattccagaacattttca

SEQ ID NO: 32739 - DNA, 20 bp, synthetic construct
  misc_feature 1..20: note = Description of Artificial Sequence: Synthetic oligonucleotide
  misc_feature 1..20: note = Target: FXN; (+) strand; PAM type: YTN; PAM sequence: CTA
  source 1..20: mol_type = other DNA
attccagaacattttcatta

SEQ ID NO: 32740 - DNA, 20 bp, synthetic construct
  misc_feature 1..20: note = Description of Artificial Sequence: Synthetic oligonucleotide
  misc_feature 1..20: note = Target: FXN; (+) strand; PAM type: YTN; PAM sequence: TTC
  source 1..20: mol_type = other DNA
cagaacattttcattattcc

SEQ ID NO: 32741 - DNA, 20 bp, synthetic construct
  misc_feature 1..20: note = Description of Artificial Sequence: Synthetic oligonucleotide
  misc_feature 1..20: note = Target: FXN; (+) strand; PAM type: YTN; PAM sequence: TTT
  source 1..20: mol_type = other DNA
tcattattccagaaggaaac

SEQ ID NO: 32742 - DNA, 20 bp, synthetic construct
  misc_feature 1..20: note = Description of Artificial Sequence: Synthetic oligonucleotide
  misc_feature 1..20: note = Target: FXN; (+) strand; PAM type: YTN; PAM sequence: TTT
  source 1..20: mol_type = other DNA
cattattccagaaggaaacc

SEQ ID NO: 32743 - DNA, 20 bp, synthetic construct
  misc_feature 1..20: note = Description of Artificial Sequence: Synthetic oligonucleotide
  misc_feature 1..20: note = Target: FXN; (+) strand; PAM type: YTN; PAM sequence: TTC
  source 1..20: mol_type = other DNA
attattccagaaggaaaccc

SEQ ID NO: 32744 - DNA, 20 bp, synthetic construct
  misc_feature 1..20: note = Description of Artificial Sequence: Synthetic oligonucleotide
  misc_feature 1..20: note = Target: FXN; (+) strand; PAM type: YTN; PAM sequence: TTA
  source 1..20: mol_type = other DNA
ttccagaaggaaaccctatt

SEQ ID NO: 32745 - DNA, 20 bp, synthetic construct
  misc_feature 1..20: note = Description of Artificial Sequence: Synthetic oligonucleotide
  misc_feature 1..20: note = Target: FXN; (+) strand; PAM type: YTN; PAM sequence: TTC
  source 1..20: mol_type = other DNA
cagaaggaaaccctattcat

SEQ ID NO: 32746 - DNA, 20 bp, synthetic construct
  misc_feature 1..20: note = Description of Artificial Sequence: Synthetic oligonucleotide
  misc_feature 1..20: note = Target: FXN; (+) strand; PAM type: YTN; PAM sequence: CTA
  source 1..20: mol_type = other DNA
ttcatattagcaatcactcc

SEQ ID NO: 32747 - DNA, 20 bp, synthetic construct
  misc_feature 1..20: note = Description of Artificial Sequence: Synthetic oligonucleotide
  misc_feature 1..20: note = Target: FXN; (+) strand; PAM type: YTN; PAM sequence: TTC
  source 1..20: mol_type = other DNA
atattagcaatcactccccc

SEQ ID NO: 32748 - DNA, 20 bp, synthetic construct
  misc_feature 1..20: note = Description of Artificial Sequence: Synthetic oligonucleotide
  misc_feature 1..20: note = Target: FXN; (+) strand; PAM type: YTN; PAM sequence: TTA
  source 1..20: mol_type = other DNA
gcaatcactcccccattccg

SEQ ID NO: 32749 - DNA, 20 bp, synthetic construct
  misc_feature 1..20: note = Description of Artificial Sequence: Synthetic oligonucleotide
  misc_feature 1..20: note = Target: FXN; (+) strand; PAM type: YTN; PAM sequence: CTC
  source 1..20: mol_type = other DNA
ccccattccgcctttcccta

SEQ ID NO: 32750 - DNA, 20 bp, synthetic construct
  misc_feature 1..20: note = Description of Artificial Sequence: Synthetic oligonucleotide
  misc_feature 1..20: note = Target: FXN; (+) strand; PAM type: YTN; PAM sequence: TTC
  source 1..20: mol_type = other DNA
cgcctttccctaaaacccag

SEQ ID NO: 32751 - DNA, 20 bp, synthetic construct
  misc_feature 1..20: note = Description of Artificial Sequence: Synthetic oligonucleotide
  misc_feature 1..20: note = Target: FXN; (+) strand; PAM type: YTN; PAM sequence: CTT
  source 1..20: mol_type = other DNA
tccctaaaacccagcaatca

SEQ ID NO: 32752 - DNA, 20 bp, synthetic construct
  misc_feature 1..20: note = Description of Artificial Sequence: Synthetic oligonucleotide
  misc_feature 1..20: note = Target: FXN; (+) strand; PAM type: YTN; PAM sequence: TTT
  source 1..20: mol_type = other DNA
ccctaaaacccagcaatcac

SEQ ID NO: 32753 - DNA, 20 bp, synthetic construct
  misc_feature 1..20: note = Description of Artificial Sequence: Synthetic oligonucleotide
  misc_feature 1..20: note = Target: FXN; (+) strand; PAM type: YTN; PAM sequence: TTC
  source 1..20: mol_type = other DNA
cctaaaacccagcaatcact

SEQ ID NO: 32754 - DNA, 20 bp, synthetic construct
  misc_feature 1..20: note = Description of Artificial Sequence: Synthetic oligonucleotide
  misc_feature 1..20: note = Target: FXN; (+) strand; PAM type: YTN; PAM sequence: CTA
  source 1..20: mol_type = other DNA
aaacccagcaatcactaatc

SEQ ID NO: 32755 - DNA, 20 bp, synthetic construct
  misc_feature 1..20: note = Description of Artificial Sequence: Synthetic oligonucleotide
  misc_feature 1..20: note = Target: FXN; (+) strand; PAM type: YTN; PAM sequence: CTA
  source 1..20: mol_type = other DNA
atctactttctgtctctgtg

SEQ ID NO: 32756 - DNA, 20 bp, synthetic construct
  misc_feature 1..20: note = Description of Artificial Sequence: Synthetic oligonucleotide
  misc_feature 1..20: note = Target: FXN; (+) strand; PAM type: YTN; PAM sequence: CTA
  source 1..20: mol_type = other DNA
ctttctgtctctgtggattt

SEQ ID NO: 32757 - DNA, 20 bp, synthetic construct
  misc_feature 1..20: note = Description of Artificial Sequence: Synthetic oligonucleotide
  misc_feature 1..20: note = Target: FXN; (+) strand; PAM type: YTN; PAM sequence: CTT
  source 1..20: mol_type = other DNA
tctgtctctgtggatttaaa

SEQ ID NO: 32758 - DNA, 20 bp, synthetic construct
  misc_feature 1..20: note = Description of Artificial Sequence: Synthetic oligonucleotide
  misc_feature 1..20: note = Target: FXN; (+) strand; PAM type: YTN; PAM sequence: TTT
  source 1..20: mol_type = other DNA
ctgtctctgtggatttaaag

SEQ ID NO: 32759 - DNA, 20 bp, synthetic construct
  misc_feature 1..20: note = Description of Artificial Sequence: Synthetic oligonucleotide
  misc_feature 1..20: note = Target: FXN; (+) strand; PAM type: YTN; PAM sequence: TTC
  source 1..20: mol_type = other DNA
tgtctctgtggatttaaagt

SEQ ID NO: 32760 - DNA, 20 bp, synthetic construct
  misc_feature 1..20: note = Description of Artificial Sequence: Synthetic oligonucleotide
  misc_feature 1..20: note = Target: FXN; (+) strand; PAM type: YTN; PAM sequence: CTG
  source 1..20: mol_type = other DNA
tctctgtggatttaaagtaa

SEQ ID NO: 32761 - DNA, 20 bp, synthetic construct
  misc_feature 1..20: note = Description of Artificial Sequence: Synthetic oligonucleotide
  misc_feature 1..20: note = Target: FXN; (+) strand; PAM type: YTN; PAM sequence: CTC
  source 1..20: mol_type = other DNA
tgtggatttaaagtaatttt

SEQ ID NO: 32762 - DNA, 20 bp, synthetic construct
  misc_feature 1..20: note = Description of Artificial Sequence: Synthetic oligonucleotide
  misc_feature 1..20: note = Target: FXN; (+) strand; PAM type: YTN; PAM sequence: CTG
  source 1..20: mol_type = other DNA
tggatttaaagtaattttaa

SEQ ID NO: 32763 - DNA, 20 bp, synthetic construct
  misc_feature 1..20: note = Description of Artificial Sequence: Synthetic oligonucleotide
  misc_feature 1..20: note = Target: FXN; (+) strand; PAM type: YTN; PAM sequence: TTT
  source 1..20: mol_type = other DNA
aaagtaattttaaatttgaa

SEQ ID NO: 32764 - DNA, 20 bp, synthetic construct
  misc_feature 1..20: note = Description of Artificial Sequence: Synthetic oligonucleotide
  misc_feature 1..20: note = Target: FXN; (+) strand; PAM type: YTN; PAM sequence: TTA
  source 1..20: mol_type = other DNA
aagtaattttaaatttgaaa

SEQ ID NO: 32765 - DNA, 20 bp, synthetic construct
  misc_feature 1..20: note = Description of Artificial Sequence: Synthetic oligonucleotide
  misc_feature 1..20: note = Target: FXN; (+) strand; PAM type: YTN; PAM sequence: TTT
  source 1..20: mol_type = other DNA
taaatttgaaaaatagtatc

SEQ ID NO: 32766 - DNA, 20 bp, synthetic construct
  misc_feature 1..20: note = Description of Artificial Sequence: Synthetic oligonucleotide
  misc_feature 1..20: note = Target: FXN; (+) strand; PAM type: YTN; PAM sequence: TTT
  source 1..20: mol_type = other DNA
aaatttgaaaaatagtatct

SEQ ID NO: 32767 - DNA, 20 bp, synthetic construct
  misc_feature 1..20: note = Description of Artificial Sequence: Synthetic oligonucleotide
  misc_feature 1..20: note = Target: FXN; (+) strand; PAM type: YTN; PAM sequence: TTA
  source 1..20: mol_type = other DNA
aatttgaaaaatagtatcta

SEQ ID NO: 32768 - DNA, 20 bp, synthetic construct
  misc_feature 1..20: note = Description of Artificial Sequence: Synthetic oligonucleotide
  misc_feature 1..20: note = Target: FXN; (+) strand; PAM type: YTN; PAM sequence: TTT
  source 1..20: mol_type = other DNA
gaaaaatagtatctataagg

SEQ ID NO: 32769 - DNA, 20 bp, synthetic construct
  misc_feature 1..20: note = Description of Artificial Sequence: Synthetic oligonucleotide
  misc_feature 1..20: note = Target: FXN; (+) strand; PAM type: YTN; PAM sequence: TTG
  source 1..20: mol_type = other DNA
aaaaatagtatctataagga

SEQ ID NO: 32770 - DNA, 20 bp, synthetic construct
  misc_feature 1..20: note = Description of Artificial Sequence: Synthetic oligonucleotide
  misc_feature 1..20: note = Target: FXN; (+) strand; PAM type: YTN; PAM sequence: CTA
  source 1..20: mol_type = other DNA
taaggaaatgtatctagtca

SEQ ID NO: 32771 - DNA, 20 bp, synthetic construct
  misc_feature 1..20: note = Description of Artificial Sequence: Synthetic oligonucleotide
  misc_feature 1..20: note = Target: FXN; (+) strand; PAM type: YTN; PAM sequence: CTA
  source 1..20: mol_type = other DNA
gtcacaagcatacagcttga

SEQ ID NO: 32772 - DNA, 20 bp, synthetic construct
  misc_feature 1..20: note = Description of Artificial Sequence: Synthetic oligonucleotide
  misc_feature 1..20: note = Target: FXN; (+) strand; PAM type: YTN; PAM sequence: CTT
  source 1..20: mol_type = other DNA
gatgaatttgtaaaaattga

SEQ ID NO: 32773 - DNA, 20 bp, synthetic construct
  misc_feature 1..20: note = Description of Artificial Sequence: Synthetic oligonucleotide
  misc_feature 1..20: note = Target: FXN; (+) strand; PAM type: YTN; PAM sequence: TTG
  source 1..20: mol_type = other DNA
atgaatttgtaaaaattgaa

SEQ ID NO: 32774 - DNA, 20 bp, synthetic construct
  misc_feature 1..20: note = Description of Artificial Sequence: Synthetic oligonucleotide
  misc_feature 1..20: note = Target: FXN; (+) strand; PAM type: YTN; PAM sequence: TTT
  source 1..20: mol_type = other DNA
gtaaaaattgaacagtccta

SEQ ID NO: 32775 - DNA, 20 bp, synthetic construct
  misc_feature 1..20: note = Description of Artificial Sequence: Synthetic oligonucleotide
  misc_feature 1..20: note = Target: FXN; (+) strand; PAM type: YTN; PAM sequence: TTG
  source 1..20: mol_type = other DNA
taaaaattgaacagtcctat

SEQ ID NO: 32776 - DNA, 20 bp, synthetic construct
  misc_feature 1..20: note = Description of Artificial Sequence: Synthetic oligonucleotide
  misc_feature 1..20: note = Target: FXN; (+) strand; PAM type: YTN; PAM sequence: TTG
  source 1..20: mol_type = other DNA
aacagtcctatgaacatacc

SEQ ID NO: 32777 - DNA, 20 bp, synthetic construct
  misc_feature 1..20: note = Description of Artificial Sequence: Synthetic oligonucleotide
  misc_feature 1..20: note = Target: FXN; (+) strand; PAM type: YTN; PAM sequence: CTA
  source 1..20: mol_type = other DNA
tgaacataccctgtaagctc

SEQ ID NO: 32778 - DNA, 20 bp, synthetic construct
  misc_feature 1..20: note = Description of Artificial Sequence: Synthetic oligonucleotide
  misc_feature 1..20: note = Target: FXN; (+) strand; PAM type: YTN; PAM sequence: CTG
  source 1..20: mol_type = other DNA
taagctcaagacatagaatg

SEQ ID NO: 32779 - DNA, 20 bp, synthetic construct
  misc_feature 1..20: note = Description of Artificial Sequence: Synthetic oligonucleotide
  misc_feature 1..20: note = Target: FXN; (+) strand; PAM type: YTN; PAM sequence: CTC
  source 1..20: mol_type = other DNA
aagacatagaatgttaccag

SEQ ID NO: 32780 - DNA, 20 bp, synthetic construct
  misc_feature 1..20: note = Description of Artificial Sequence: Synthetic oligonucleotide
  misc_feature 1..20: note = Target: FXN; (+) strand; PAM type: YTN; PAM sequence: TTA
  source 1..20: mol_type = other DNA
ccagcccctgcaagcaagct

SEQ ID NO: 32781 - DNA, 20 bp, synthetic construct
  misc_feature 1..20: note = Description of Artificial Sequence: Synthetic oligonucleotide
  misc_feature 1..20: note = Target: FXN; (+) strand; PAM type: YTN; PAM sequence: CTG
  source 1..20: mol_type = other DNA
caagcaagctgcctgctcac

SEQ ID NO: 32782 - DNA, 20 bp, synthetic construct
  misc_feature 1..20: note = Description of Artificial Sequence: Synthetic oligonucleotide
  misc_feature 1..20: note = Target: FXN; (+) strand; PAM type: YTN; PAM sequence: CTG
  source 1..20: mol_type = other DNA
cctgctcacttctagtcatt

SEQ ID NO: 32783 - DNA, 20 bp, synthetic construct
  misc_feature 1..20: note = Description of Artificial Sequence: Synthetic oligonucleotide
  misc_feature 1..20: note = Target: FXN; (+) strand; PAM type: YTN; PAM sequence: CTG
  source 1..20: mol_type = other DNA
ctcacttctagtcattaacc

SEQ ID NO: 32784 - DNA, 20 bp, synthetic construct
  misc_feature 1..20: note = Description of Artificial Sequence: Synthetic oligonucleotide
  misc_feature 1..20: note = Target: FXN; (+) strand; PAM type: YTN; PAM sequence: CTC
  source 1..20: mol_type = other DNA
acttctagtcattaacccct

SEQ ID NO: 32785 - DNA, 20 bp, synthetic construct
  misc_feature 1..20: note = Description of Artificial Sequence: Synthetic oligonucleotide
  misc_feature 1..20: note = Target: FXN; (+) strand; PAM type: YTN; PAM sequence: CTT
  source 1..20: mol_type = other DNA
ctagtcattaacccctccct

SEQ ID NO: 32786 - DNA, 20 bp, synthetic construct
  misc_feature 1..20: note = Description of Artificial Sequence: Synthetic oligonucleotide
  misc_feature 1..20: note = Target: FXN; (+) strand; PAM type: YTN; PAM sequence: TTC
  source 1..20: mol_type = other DNA
tagtcattaacccctccctc

SEQ ID NO: 32787 - DNA, 20 bp, synthetic construct
  misc_feature 1..20: note = Description of Artificial Sequence: Synthetic oligonucleotide
  misc_feature 1..20: note = Target: FXN; (+) strand; PAM type: YTN; PAM sequence: CTA
  source 1..20: mol_type = other DNA
gtcattaacccctccctctt

SEQ ID NO: 32788 - DNA, 20 bp, synthetic construct
  misc_feature 1..20: note = Description of Artificial Sequence: Synthetic oligonucleotide
  misc_feature 1..20: note = Target: FXN; (+) strand; PAM type: YTN; PAM sequence: TTA
  source 1..20: mol_type = other DNA
acccctccctcttttccttc

SEQ ID NO: 32789 - DNA, 20 bp, synthetic construct
  misc_feature 1..20: note = Description of Artificial Sequence: Synthetic oligonucleotide
  misc_feature 1..20: note = Target: FXN; (+) strand; PAM type: YTN; PAM sequence: CTC
  source 1..20: mol_type = other DNA
cctcttttccttctagtcat

SEQ ID NO: 32790 - DNA, 20 bp, synthetic construct
  misc_feature 1..20: note = Description of Artificial Sequence: Synthetic oligonucleotide
  misc_feature 1..20: note = Target: FXN; (+) strand; PAM type: YTN; PAM sequence: CTC
  source 1..20: mol_type = other DNA
ttttccttctagtcattaac

SEQ ID NO: 32791 - DNA, 20 bp, synthetic construct
  misc_feature 1..20: note = Description of Artificial Sequence: Synthetic oligonucleotide
  misc_feature 1..20: note = Target: FXN; (+) strand; PAM type: YTN; PAM sequence: CTT
  source 1..20: mol_type = other DNA
ttccttctagtcattaaccc

SEQ ID NO: 32792 - DNA, 20 bp, synthetic construct
  misc_feature 1..20: note = Description of Artificial Sequence: Synthetic oligonucleotide
  misc_feature 1..20: note = Target: FXN; (+) strand; PAM type: YTN; PAM sequence: TTT
  source 1..20: mol_type = other DNA
tccttctagtcattaaccct

SEQ ID NO: 32793 - DNA, 20 bp, synthetic construct
  misc_feature 1..20: note = Description of Artificial Sequence: Synthetic oligonucleotide
  misc_feature 1..20: note = Target: FXN; (+) strand; PAM type: YTN; PAM sequence: TTT
  source 1..20: mol_type = other DNA
ccttctagtcattaaccctt

SEQ ID NO: 32794 - DNA, 20 bp, synthetic construct
  misc_feature 1..20: note = Description of Artificial Sequence: Synthetic oligonucleotide
  misc_feature 1..20: note = Target: FXN; (+) strand; PAM type: YTN; PAM sequence: TTC
  source 1..20: mol_type = other DNA
cttctagtcattaacccttc

SEQ ID NO: 32795 - DNA, 20 bp, synthetic construct
  misc_feature 1..20: note = Description of Artificial Sequence: Synthetic oligonucleotide
  misc_feature 1..20: note = Target: FXN; (+) strand; PAM type: YTN; PAM sequence: CTT
  source 1..20: mol_type = other DNA
ctagtcattaacccttcaga

SEQ ID NO: 32796 - DNA, 20 bp, synthetic construct
  misc_feature 1..20: note = Description of Artificial Sequence: Synthetic oligonucleotide
  misc_feature 1..20: note = Target: FXN; (+) strand; PAM type: YTN; PAM sequence: TTC
  source 1..20: mol_type = other DNA
tagtcattaacccttcagag

SEQ ID NO: 32797 - DNA, 20 bp, synthetic construct
  misc_feature 1..20: note = Description of Artificial Sequence: Synthetic oligonucleotide
  misc_feature 1..20: note = Target: FXN; (+) strand; PAM type: YTN; PAM sequence: CTA
  source 1..20: mol_type = other DNA
gtcattaacccttcagagta

SEQ ID NO: 32798 - DNA, 20 bp, synthetic construct
  misc_feature 1..20: note = Description of Artificial Sequence: Synthetic oligonucleotide
  misc_feature 1..20: note = Target: FXN; (+) strand; PAM type: YTN; PAM sequence: TTA
  source 1..20: mol_type = other DNA
acccttcagagtaactattc

SEQ ID NO: 32799 - DNA, 20 bp, synthetic construct
  misc_feature 1..20: note = Description of Artificial Sequence: Synthetic oligonucleotide
  misc_feature 1..20: note = Target: FXN; (+) strand; PAM type: YTN; PAM sequence: CTT
  source 1..20: mol_type = other DNA
cagagtaactattctgatta

SEQ ID NO: 32800 - DNA, 20 bp, synthetic construct
  misc_feature 1..20: note = Description of Artificial Sequence: Synthetic oligonucleotide
  misc_feature 1..20: note = Target: FXN; (+) strand; PAM type: YTN; PAM sequence: TTC
  source 1..20: mol_type = other DNA
agagtaactattctgattac

SEQ ID NO: 32801 - DNA, 20 bp, synthetic construct
  misc_feature 1..20: note = Description of Artificial Sequence: Synthetic oligonucleotide
  misc_feature 1..20: note = Target: FXN; (+) strand; PAM type: YTN; PAM sequence: CTA
  source 1..20: mol_type = other DNA
ttctgattaccaatagcata

SEQ ID NO: 32802 - DNA, 20 bp, synthetic construct
  misc_feature 1..20: note = Description of Artificial Sequence: Synthetic oligonucleotide
  misc_feature 1..20: note = Target: FXN; (+) strand; PAM type: YTN; PAM sequence: TTC
  source 1..20: mol_type = other DNA
tgattaccaatagcatagat

SEQ ID NO: 32803 - DNA, 20 bp, synthetic construct
  misc_feature 1..20: note = Description of Artificial Sequence: Synthetic oligonucleotide
  misc_feature 1..20: note = Target: FXN; (+) strand; PAM type: YTN; PAM sequence: CTG
  source 1..20: mol_type = other DNA
attaccaatagcatagatta

SEQ ID NO: 32804 - DNA, 20 bp, synthetic construct
  misc_feature 1..20: note = Description of Artificial Sequence: Synthetic oligonucleotide
  misc_feature 1..20: note = Target: FXN; (+) strand; PAM type: YTN; PAM sequence: TTA
  source 1..20: mol_type = other DNA
ccaatagcatagattagttc

SEQ ID NO: 32805 - DNA, 20 bp, synthetic construct
  misc_feature 1..20: note = Description of Artificial Sequence: Synthetic oligonucleotide
  misc_feature 1..20: note = Target: FXN; (+) strand; PAM type: YTN; PAM sequence: TTA
  source 1..20: mol_type = other DNA
gttctgcctgttgttttact

SEQ ID NO: 32806 - DNA, 20 bp, synthetic construct
  misc_feature 1..20: note = Description of Artificial Sequence: Synthetic oligonucleotide
  misc_feature 1..20: note = Target: FXN; (+) strand; PAM type: YTN; PAM sequence: TTC
  source 1..20: mol_type = other DNA
tgcctgttgttttactttat

SEQ ID NO: 32807 - DNA, 20 bp, synthetic construct
  misc_feature 1..20: note = Description of Artificial Sequence: Synthetic oligonucleotide
  misc_feature 1..20: note = Target: FXN; (+) strand; PAM type: YTN; PAM sequence: CTG
  source 1..20: mol_type = other DNA
cctgttgttttactttatat

SEQ ID NO: 32808 - DNA, 20 bp, synthetic construct
  misc_feature 1..20: note = Description of Artificial Sequence: Synthetic oligonucleotide
  misc_feature 1..20: note = Target: FXN; (+) strand; PAM type: YTN; PAM sequence: CTG
  source 1..20: mol_type = other DNA
ttgttttactttatataaac

SEQ ID NO: 32809 - DNA, 20 bp, synthetic construct
  misc_feature 1..20: note = Description of Artificial Sequence: Synthetic oligonucleotide
  misc_feature 1..20: note = Target: FXN; (+) strand; PAM type: YTN; PAM sequence: TTG
  source 1..20: mol_type = other DNA
ttttactttatataaactgt

SEQ ID NO: 32810 - DNA, 20 bp, synthetic construct
  misc_feature 1..20: note = Description of Artificial Sequence: Synthetic oligonucleotide
  misc_feature 1..20: note = Target: FXN; (+) strand; PAM type: YTN; PAM sequence: TTT
  source 1..20: mol_type = other DNA
tactttatataaactgtctc

SEQ ID NO: 32811 - DNA, 20 bp, synthetic construct
  misc_feature 1..20: note = Description of Artificial Sequence: Synthetic oligonucleotide
  misc_feature 1..20: note = Target: FXN; (+) strand; PAM type: YTN; PAM sequence: TTT
  source 1..20: mol_type = other DNA
actttatataaactgtctca

SEQ ID NO: 32812 - DNA, 20 bp, synthetic construct
  misc_feature 1..20: note = Description of Artificial Sequence: Synthetic oligonucleotide
  misc_feature 1..20: note = Target: FXN; (+) strand; PAM type: YTN; PAM sequence: TTA
  source 1..20: mol_type = other DNA
ctttatataaactgtctcat

SEQ ID NO: 32813 - DNA, 20 bp, synthetic construct
  misc_feature 1..20: note = Description of Artificial Sequence: Synthetic oligonucleotide
  misc_feature 1..20: note = Target: FXN; (+) strand; PAM type: YTN; PAM sequence: CTT
  source 1..20: mol_type = other DNA
tatataaactgtctcattaa

SEQ ID NO: 32814 - DNA, 20 bp, synthetic construct
  misc_feature 1..20: note = Description of Artificial Sequence: Synthetic oligonucleotide
  misc_feature 1..20: note = Target: FXN; (+) strand; PAM type: YTN; PAM sequence: TTT
  source 1..20: mol_type = other DNA
atataaactgtctcattaag

SEQ ID NO: 32815 - DNA, 20 bp, synthetic construct
  misc_feature 1..20: note = Description of Artificial Sequence: Synthetic oligonucleotide
  misc_feature 1..20: note = Target: FXN; (+) strand; PAM type: YTN; PAM sequence: TTA
  source 1..20: mol_type = other DNA
tataaactgtctcattaagt

SEQ ID NO: 32816 - DNA, 20 bp, synthetic construct
  misc_feature 1..20: note = Description of Artificial Sequence: Synthetic oligonucleotide
  misc_feature 1..20: note = Target: FXN; (+) strand; PAM type: YTN; PAM sequence: CTG
  source 1..20: mol_type = other DNA
tctcattaagtataaacatg

SEQ ID NO: 32817 - DNA, 20 bp, synthetic construct
  misc_feature 1..20: note = Description of Artificial Sequence: Synthetic oligonucleotide
  misc_feature 1..20: note = Target: FXN; (+) strand; PAM type: YTN; PAM sequence: CTC
  source 1..20: mol_type = other DNA
attaagtataaacatgtttg

SEQ ID NO: 32818 - DNA, 20 bp, synthetic construct
  misc_feature 1..20: note = Description of Artificial Sequence: Synthetic oligonucleotide
  misc_feature 1..20: note = Target: FXN; (+) strand; PAM type: YTN; PAM sequence: TTA
  source 1..20: mol_type = other DNA
agtataaacatgtttgtgta

SEQ ID NO: 32819 - DNA, 20 bp, synthetic construct
  misc_feature 1..20: note = Description of Artificial Sequence: Synthetic oligonucleotide
  misc_feature 1..20: note = Target: FXN; (+) strand; PAM type: YTN; PAM sequence: TTT
  source 1..20: mol_type = other DNA
gtgtatacttgtgtatttct

SEQ ID NO: 32820 - DNA, 20 bp, synthetic construct
  misc_feature 1..20: note = Description of Artificial Sequence: Synthetic oligonucleotide
  misc_feature 1..20: note = Target: FXN; (+) strand; PAM type: YTN; PAM sequence: TTG
  source 1..20: mol_type = other DNA
tgtatacttgtgtatttctt

SEQ ID NO: 32821 - DNA, 20 bp, synthetic construct
  misc_feature 1..20: note = Description of Artificial Sequence: Synthetic oligonucleotide
  misc_feature 1..20: note = Target: FXN; (+) strand; PAM type: YTN; PAM sequence: CTT
  source 1..20: mol_type = other DNA
gtgtatttctttctatcaca

SEQ ID NO: 32822 - DNA, 20 bp, synthetic construct
  misc_feature 1..20: note = Description of Artificial Sequence: Synthetic oligonucleotide
  misc_feature 1..20: note = Target: FXN; (+) strand; PAM type: YTN; PAM sequence: TTG
  source 1..20: mol_type = other DNA
tgtatttctttctatcacaa

SEQ ID NO: 32823 - DNA, 20 bp, synthetic construct
  misc_feature 1..20: note = Description of Artificial Sequence: Synthetic oligonucleotide
  misc_feature 1..20: note = Target: FXN; (+) strand; PAM type: YTN; PAM sequence: TTT
  source 1..20: mol_type = other DNA
ctttctatcacaatgatgtt

SEQ ID NO: 32824 - DNA, 20 bp, synthetic construct
  misc_feature 1..20: note = Description of Artificial Sequence: Synthetic oligonucleotide
  misc_feature 1..20: note = Target: FXN; (+) strand; PAM type: YTN; PAM sequence: TTC
  source 1..20: mol_type = other DNA
tttctatcacaatgatgttt

SEQ ID NO: 32825 - DNA, 20 bp, synthetic construct
  misc_feature 1..20: note = Description of Artificial Sequence: Synthetic oligonucleotide
  misc_feature 1..20: note = Target: FXN; (+) strand; PAM type: YTN; PAM sequence: CTT
  source 1..20: mol_type = other DNA
tctatcacaatgatgtttgt

SEQ ID NO: 32826 - DNA, 20 bp, synthetic construct
  misc_feature 1..20: note = Description of Artificial Sequence: Synthetic oligonucleotide
  misc_feature 1..20: note = Target: FXN; (+) strand; PAM type: YTN; PAM sequence: TTT
  source 1..20: mol_type = other DNA
ctatcacaatgatgtttgtg

SEQ ID NO: 32827 - DNA, 20 bp, synthetic construct
  misc_feature 1..20: note = Description of Artificial Sequence: Synthetic oligonucleotide
  misc_feature 1..20: note = Target: FXN; (+) strand; PAM type: YTN; PAM sequence: TTC
  source 1..20: mol_type = other DNA
tatcacaatgatgtttgtga

SEQ ID NO: 32828 - DNA, 20 bp, synthetic construct
  misc_feature 1..20: note = Description of Artificial Sequence: Synthetic oligonucleotide
  misc_feature 1..20: note = Target: FXN; (+) strand; PAM type: YTN; PAM sequence: CTA
  source 1..20: mol_type = other DNA
tcacaatgatgtttgtgaga

SEQ ID NO: 32829 - DNA, 20 bp, synthetic construct
  misc_feature 1..20: note = Description of Artificial Sequence: Synthetic oligonucleotide
  misc_feature 1..20: note = Target: FXN; (+) strand; PAM type: YTN; PAM sequence: TTT
  source 1..20: mol_type = other DNA
gtgagattcatccatgctgt

SEQ ID NO: 32830 - DNA, 20 bp, synthetic construct
  misc_feature 1..20: note = Description of Artificial Sequence: Synthetic oligonucleotide
  misc_feature 1..20: note = Target: FXN; (+) strand; PAM type: YTN; PAM sequence: TTG
  source 1..20: mol_type = other DNA
tgagattcatccatgctgtt

SEQ ID NO: 32831 - DNA, 20 bp, synthetic construct
  misc_feature 1..20: note = Description of Artificial Sequence: Synthetic oligonucleotide
  misc_feature 1..20: note = Target: FXN; (+) strand; PAM type: YTN; PAM sequence: TTC
  source 1..20: mol_type = other DNA
atccatgctgttcctataga

SEQ ID NO: 32832 - DNA, 20 bp, synthetic construct
  misc_feature 1..20: note = Description of Artificial Sequence: Synthetic oligonucleotide
  misc_feature 1..20: note = Target: FXN; (+) strand; PAM type: YTN; PAM sequence: CTG
  source 1..20: mol_type = other DNA
ttcctatagacaattctatt

SEQ ID NO: 32833 - DNA, 20 bp, synthetic construct
  misc_feature 1..20: note = Description of Artificial Sequence: Synthetic oligonucleotide
  misc_feature 1..20: note = Target: FXN; (+) strand; PAM type: YTN; PAM sequence: TTC
  source 1..20: mol_type = other DNA
ctatagacaattctattttg

SEQ ID NO: 32834 - DNA, 20 bp, synthetic construct
  misc_feature 1..20: note = Description of Artificial Sequence: Synthetic oligonucleotide
  misc_feature 1..20: note = Target: FXN; (+) strand; PAM type: YTN; PAM sequence: CTA
  source 1..20: mol_type = other DNA
tagacaattctattttgcag

SEQ ID NO: 32835 - DNA, 20 bp, synthetic construct
  misc_feature 1..20: note = Description of Artificial Sequence: Synthetic oligonucleotide
  misc_feature 1..20: note = Target: FXN; (+) strand; PAM type: YTN; PAM sequence: TTC
  source 1..20: mol_type = other DNA
tattttgcagcgtagtattc

SEQ ID NO: 32836 - DNA, 20 bp, synthetic construct
  misc_feature 1..20: note = Description of Artificial Sequence: Synthetic oligonucleotide
  misc_feature 1..20: note = Target: FXN; (+) strand; PAM type: YTN; PAM sequence: CTA
  source 1..20: mol_type = other DNA
ttttgcagcgtagtattcca

SEQ ID NO: 32837 - DNA, 20 bp, synthetic construct
  misc_feature 1..20: note = Description of Artificial Sequence: Synthetic oligonucleotide
  misc_feature 1..20: note = Target: FXN; (+) strand; PAM type: YTN; PAM sequence: TTT
  source 1..20: mol_type = other DNA
tgcagcgtagtattccattg

SEQ ID NO: 32838 - DNA, 20 bp, synthetic construct
  misc_feature 1..20: note = Description of Artificial Sequence: Synthetic oligonucleotide
  misc_feature 1..20: note = Target: FXN; (+) strand; PAM type: YTN; PAM sequence: TTT
  source 1..20: mol_type = other DNA
gcagcgtagtattccattgc

SEQ ID NO: 32839 - DNA, 20 bp, synthetic construct
  misc_feature 1..20: note = Description of Artificial Sequence: Synthetic oligonucleotide
  misc_feature 1..20: note = Target: FXN; (+) strand; PAM type: YTN; PAM sequence: TTG
  source 1..20: mol_type = other DNA
cagcgtagtattccattgca

SEQ ID NO: 32840 - DNA, 20 bp, synthetic construct
  misc_feature 1..20: note = Description of Artificial Sequence: Synthetic oligonucleotide
  misc_feature 1..20: note = Target: FXN; (+) strand; PAM type: YTN; PAM sequence: TTC
  source 1..20: mol_type = other DNA
cattgcatgactataccaca

SEQ ID NO: 32841 - DNA, 20 bp, synthetic construct
  misc_feature 1..20: note = Description of Artificial Sequence: Synthetic oligonucleotide
  misc_feature 1..20: note = Target: FXN; (+) strand; PAM type: YTN; PAM sequence: TTG
  source 1..20: mol_type = other DNA
catgactataccacaattta

SEQ ID NO: 32842 - DNA, 20 bp, synthetic construct
  misc_feature 1..20: note = Description of Artificial Sequence: Synthetic oligonucleotide
  misc_feature 1..20: note = Target: FXN; (+) strand; PAM type: YTN; PAM sequence: CTA
  source 1..20: mol_type = other DNA
taccacaatttatctgtgat

SEQ ID NO: 32843 - DNA, 20 bp, synthetic construct
  misc_feature 1..20: note = Description of Artificial Sequence: Synthetic oligonucleotide
  misc_feature 1..20: note = Target: FXN; (+) strand; PAM type: YTN; PAM sequence: TTT
  source 1..20: mol_type = other DNA
atctgtgatattacaaagga

SEQ ID NO: 32844 - DNA, 20 bp, synthetic construct
  misc_feature 1..20: note = Description of Artificial Sequence: Synthetic oligonucleotide
  misc_feature 1..20: note = Target: FXN; (+) strand; PAM type: YTN; PAM sequence: TTA
  source 1..20: mol_type = other DNA
tctgtgatattacaaaggaa

SEQ ID NO: 32845 - DNA, 20 bp, synthetic construct
  misc_feature 1..20: note = Description of Artificial Sequence: Synthetic oligonucleotide
  misc_feature 1..20: note = Target: FXN; (+) strand; PAM type: YTN; PAM sequence: CTG
  source 1..20: mol_type = other DNA
tgatattacaaaggaatact

SEQ ID NO: 32846 - DNA, 20 bp, synthetic construct
  misc_feature 1..20: note = Description of Artificial Sequence: Synthetic oligonucleotide
  misc_feature 1..20: note = Target: FXN; (+) strand; PAM type: YTN; PAM sequence: TTA
  source 1..20: mol_type = other DNA
caaaggaatacttgggcagt

SEQ ID NO: 32847 - DNA, 20 bp, synthetic construct
  misc_feature 1..20: note = Description of Artificial Sequence: Synthetic oligonucleotide
  misc_feature 1..20: note = Target: FXN; (+) strand; PAM type: YTN; PAM sequence: CTT
  source 1..20: mol_type = other DNA
gggcagtttccagtttgggg

SEQ ID NO: 32848 - DNA, 20 bp, synthetic construct
  misc_feature 1..20: note = Description of Artificial Sequence: Synthetic oligonucleotide
  misc_feature 1..20: note = Target: FXN; (+) strand; PAM type: YTN; PAM sequence: TTG
  source 1..20: mol_type = other DNA
ggcagtttccagtttggggc

SEQ ID NO: 32849 - DNA, 20 bp, synthetic construct
  misc_feature 1..20: note = Description of Artificial Sequence: Synthetic oligonucleotide
  misc_feature 1..20: note = Target: FXN; (+) strand; PAM type: YTN; PAM sequence: TTT
  source 1..20: mol_type = other DNA
ccagtttggggctataggat

SEQ ID NO: 32850 - DNA, 20 bp, synthetic construct
  misc_feature 1..20: note = Description of Artificial Sequence: Synthetic oligonucleotide
  misc_feature 1..20: note = Target: FXN; (+) strand; PAM type: YTN; PAM sequence: TTC
  source 1..20: mol_type = other DNA
cagtttggggctataggata

SEQ ID NO: 32851 - DNA, 20 bp, synthetic construct
  misc_feature 1..20: note = Description of Artificial Sequence: Synthetic oligonucleotide
  misc_feature 1..20: note = Target: FXN; (+) strand; PAM type: YTN; PAM sequence: TTT
  source 1..20: mol_type = other DNA
ggggctataggatagttgtg

SEQ ID NO: 32852 - DNA, 20 bp, synthetic construct
  misc_feature 1..20: note = Description of Artificial Sequence: Synthetic oligonucleotide
  misc_feature 1..20: note = Target: FXN; (+) strand; PAM type: YTN; PAM sequence: TTG
  source 1..20: mol_type = other DNA
gggctataggatagttgtga

SEQ ID NO: 32853 - DNA, 20 bp, synthetic construct
  misc_feature 1..20: note = Description of Artificial Sequence: Synthetic oligonucleotide
  misc_feature 1..20: note = Target: FXN; (+) strand; PAM type: YTN; PAM sequence: CTA
  source 1..20: mol_type = other DNA
taggatagttgtgatacaaa

SEQ ID NO: 32854 - DNA, 20 bp, synthetic construct
  misc_feature 1..20: note = Description of Artificial Sequence: Synthetic oligonucleotide
  misc_feature 1..20: note = Target: FXN; (+) strand; PAM type: YTN; PAM sequence: TTG
  source 1..20: mol_type = other DNA
tgatacaaatattttagtat

SEQ ID NO: 32855 - DNA, 20 bp, synthetic construct
  misc_feature 1..20: note = Description of Artificial Sequence: Synthetic oligonucleotide
  misc_feature 1..20: note = Target: FXN; (+) strand; PAM type: YTN; PAM sequence: TTT
  source 1..20: mol_type = other DNA
tagtatagtacatgtctttt

SEQ ID NO: 32856 - DNA, 20 bp, synthetic construct
  misc_feature 1..20: note = Description of Artificial Sequence: Synthetic oligonucleotide
  misc_feature 1..20: note = Target: FXN; (+) strand; PAM type: YTN; PAM sequence: TTT
  source 1..20: mol_type = other DNA
agtatagtacatgtcttttg

SEQ ID NO: 32857 - DNA, 20 bp, synthetic construct
  misc_feature 1..20: note = Description of Artificial Sequence: Synthetic oligonucleotide
  misc_feature 1..20: note = Target: FXN; (+) strand; PAM type: YTN; PAM sequence: TTA
  source 1..20: mol_type = other DNA
gtatagtacatgtcttttgg

SEQ ID NO: 32858 - DNA, 20 bp, synthetic construct
  misc_feature 1..20: note = Description of Artificial Sequence: Synthetic oligonucleotide
  misc_feature 1..20: note = Target: FXN; (+) strand; PAM type: YTN; PAM sequence: CTT
  source 1..20: mol_type = other DNA
ttggtgaacctgggtacaca

SEQ ID NO: 32859 - DNA, 20 bp, synthetic construct
  misc_feature 1..20: note = Description of Artificial Sequence: Synthetic oligonucleotide
  misc_feature 1..20: note = Target: FXN; (+) strand; PAM type: YTN; PAM sequence: TTT
  source 1..20: mol_type = other DNA
tggtgaacctgggtacacat

SEQ ID NO: 32860 - DNA, 20 bp, synthetic construct
  misc_feature 1..20: note = Description of Artificial Sequence: Synthetic oligonucleotide
  misc_feature 1..20: note = Target: FXN; (+) strand; PAM type: YTN; PAM sequence: TTT
  source 1..20: mol_type = other DNA
ggtgaacctgggtacacatt

SEQ ID NO: 32861 - DNA, 20 bp, synthetic construct
  misc_feature 1..20: note = Description of Artificial Sequence: Synthetic oligonucleotide
  misc_feature 1..20: note = Target: FXN; (+) strand; PAM type: YTN; PAM sequence: TTG
  source 1..20: mol_type = other DNA
gtgaacctgggtacacattt

SEQ ID NO: 32862 - DNA, 20 bp, synthetic construct
  misc_feature 1..20: note = Description of Artificial Sequence: Synthetic oligonucleotide
  misc_feature 1..20: note = Target: FXN; (+) strand; PAM type: YTN; PAM sequence: CTG
  source 1..20: mol_type = other DNA
ggtacacatttctgttgtgt

SEQ ID NO: 32863 - DNA, 20 bp, synthetic construct
  misc_feature 1..20: note = Description of Artificial Sequence: Synthetic oligonucleotide
  misc_feature 1..20: note = Target: FXN; (+) strand; PAM type: YTN; PAM sequence: TTT
  source 1..20: mol_type = other DNA
ctgttgtgtataccccttaa

SEQ ID NO: 32864 - DNA, 20 bp, synthetic construct
  misc_feature 1..20: note = Description of Artificial Sequence: Synthetic oligonucleotide
  misc_feature 1..20: note = Target: FXN; (+) strand; PAM type: YTN; PAM sequence: TTC
  source 1..20: mol_type = other DNA
tgttgtgtataccccttaag

SEQ ID NO: 32865 - DNA, 20 bp, synthetic construct
  misc_feature 1..20: note = Description of Artificial Sequence: Synthetic oligonucleotide
  misc_feature 1..20: note = Target: FXN; (+) strand; PAM type: YTN; PAM sequence: CTG
  source 1..20: mol_type = other DNA
ttgtgtataccccttaagag

SEQ ID NO: 32866 - DNA, 20 bp, synthetic construct
  misc_feature 1..20: note = Description of Artificial Sequence: Synthetic oligonucleotide
  misc_feature 1..20: note = Target: FXN; (+) strand; PAM type: YTN; PAM sequence: TTG
  source 1..20: mol_type = other DNA
tgtataccccttaagagtgg

SEQ ID NO: 32867 - DNA, 20 bp, synthetic construct
  misc_feature 1..20: note = Description of Artificial Sequence: Synthetic oligonucleotide
  misc_feature 1..20: note = Target: FXN; (+) strand; PAM type: YTN; PAM sequence: CTT
  source 1..20: mol_type = other DNA
aagagtggagctgatgatcc

SEQ ID NO: 32868 - DNA, 20 bp, synthetic construct
  misc_feature 1..20: note = Description of Artificial Sequence: Synthetic oligonucleotide
  misc_feature 1..20: note = Target: FXN; (+) strand; PAM type: YTN; PAM sequence: TTA
  source 1..20: mol_type = other DNA
agagtggagctgatgatcct

SEQ ID NO: 32869 - DNA, 20 bp, synthetic construct
  misc_feature 1..20: note = Description of Artificial Sequence: Synthetic oligonucleotide
  misc_feature 1..20: note = Target: FXN; (+) strand; PAM type: YTN; PAM sequence: CTG
  source 1..20: mol_type = other DNA
atgatcctggctaacaaggt

SEQ ID NO: 32870 - DNA, 20 bp, synthetic construct
  misc_feature 1..20: note = Description of Artificial Sequence: Synthetic oligonucleotide
  misc_feature 1..20: note = Target: FXN; (+) strand; PAM type: YTN; PAM sequence: CTG
  source 1..20: mol_type = other DNA
gctaacaaggtgaaaccccg

SEQ ID NO: 32871 - DNA, 20 bp, synthetic construct
  misc_feature 1..20: note = Description of Artificial Sequence: Synthetic oligonucleotide
  misc_feature 1..20: note = Target: FXN; (+) strand; PAM type: YTN; PAM sequence: CTA
  source 1..20: mol_type = other DNA
acaaggtgaaaccccgtctc

SEQ ID NO: 32872 - DNA, 20 bp, synthetic construct
  misc_feature 1..20: note = Description of Artificial Sequence: Synthetic oligonucleotide
  misc_feature 1..20: note = Target: FXN; (+) strand; PAM type: YTN; PAM sequence: CTC
  source 1..20: mol_type = other DNA
tactaaaaatacaaaaaatt

SEQ ID NO: 32873 - DNA, 20 bp, synthetic construct
  misc_feature 1..20: note = Description of Artificial Sequence: Synthetic oligonucleotide
  misc_feature 1..20: note = Target: FXN; (+) strand; PAM type: YTN; PAM sequence: CTA
  source 1..20: mol_type = other DNA
ctaaaaatacaaaaaattag

SEQ ID NO: 32874 - DNA, 20 bp, synthetic construct
  misc_feature 1..20: note = Description of Artificial Sequence: Synthetic oligonucleotide
  misc_feature 1..20: note = Target: FXN; (+) strand; PAM type: YTN; PAM sequence: CTA
  source 1..20: mol_type = other DNA
aaaatacaaaaaattagccg

SEQ ID NO: 32875 - DNA, 20 bp, synthetic construct
  misc_feature 1..20: note = Description of Artificial Sequence: Synthetic oligonucleotide
  misc_feature 1..20: note = Target: FXN; (+) strand; PAM type: YTN; PAM sequence: TTA
  source 1..20: mol_type = other DNA
gccgggcgtggtagcgggcg

SEQ ID NO: 32876 - DNA, 20 bp, synthetic construct
  misc_feature 1..20: note = Description of Artificial Sequence: Synthetic oligonucleotide
  misc_feature 1..20: note = Target: FXN; (+) strand; PAM type: YTN; PAM sequence: CTG
  source 1..20: mol_type = other DNA
tagtcccagctactcgggag

SEQ ID NO: 32877 - DNA, 20 bp, synthetic construct
  misc_feature 1..20: note = Description of Artificial Sequence: Synthetic oligonucleotide
  misc_feature 1..20: note = Target: FXN; (+) strand; PAM type: YTN; PAM sequence: CTA
  source 1..20: mol_type = other DNA
ctcgggaggctgaggcagga

SEQ ID NO: 32878 - DNA, 20 bp, synthetic construct
  misc_feature 1..20: note = Description of Artificial Sequence: Synthetic oligonucleotide
  misc_feature 1..20: note = Target: FXN; (+) strand; PAM type: YTN; PAM sequence: CTC
  source 1..20: mol_type = other DNA
gggaggctgaggcaggagaa

SEQ ID NO: 32879 - DNA, 20 bp, synthetic construct
  misc_feature 1..20: note = Description of Artificial Sequence: Synthetic oligonucleotide
  misc_feature 1..20: note = Target: FXN; (+) strand; PAM type: YTN; PAM sequence: CTG
  source 1..20: mol_type = other DNA
aggcaggagaatggcgtgaa

SEQ ID NO: 32880 - DNA, 20 bp, synthetic construct
  misc_feature 1..20: note = Description of Artificial Sequence: Synthetic oligonucleotide
  misc_feature 1..20: note = Target: FXN; (+) strand; PAM type: YTN; PAM sequence: CTT
  source 1..20: mol_type = other DNA
gcttgcagtgagccgagatc

SEQ ID NO: 32881 - DNA, 20 bp, synthetic construct
  misc_feature 1..20: note = Description of Artificial Sequence: Synthetic oligonucleotide
  misc_feature 1..20: note = Target: FXN; (+) strand; PAM type: YTN; PAM sequence: TTG
  source 1..20: mol_type = other DNA
cttgcagtgagccgagatcg

SEQ ID NO: 32882 - DNA, 20 bp, synthetic construct
  misc_feature 1..20: note = Description of Artificial Sequence: Synthetic oligonucleotide
  misc_feature 1..20: note = Target: FXN; (+) strand; PAM type: YTN; PAM sequence: CTT
  source 1..20: mol_type = other DNA
gcagtgagccgagatcgcgc

SEQ ID NO: 32883 - DNA, 20 bp, synthetic construct
  misc_feature 1..20: note = Description of Artificial Sequence: Synthetic oligonucleotide
  misc_feature 1..20: note = Target: FXN; (+) strand; PAM type: YTN; PAM sequence: TTG
  source 1..20: mol_type = other DNA
cagtgagccgagatcgcgcc

SEQ ID NO: 32884 - DNA, 20 bp, synthetic construct
  misc_feature 1..20: note = Description of Artificial Sequence: Synthetic oligonucleotide
  misc_feature 1..20: note = Target: FXN; (+) strand; PAM type: YTN; PAM sequence: CTG
  source 1..20: mol_type = other DNA
cactccagcctgggcgacag

SEQ ID NO: 32885 - DNA, 20 bp, synthetic construct
  misc_feature 1..20: note = Description of Artificial Sequence: Synthetic oligonucleotide
  misc_feature 1..20: note = Target: FXN; (+) strand; PAM type: YTN; PAM sequence: CTC
  source 1..20: mol_type = other DNA
cagcctgggcgacagagcga

SEQ ID NO: 32886 - DNA, 20 bp, synthetic construct
  misc_feature 1..20: note = Description of Artificial Sequence: Synthetic oligonucleotide
  misc_feature 1..20: note = Target: FXN; (+) strand; PAM type: YTN; PAM sequence: CTG
  source 1..20: mol_type = other DNA
ggcgacagagcgagactccg

SEQ ID NO: 32887 - DNA, 20 bp, synthetic construct
  misc_feature 1..20: note = Description of Artificial Sequence: Synthetic oligonucleotide
  misc_feature 1..20: note = Target: FXN; (+) strand; PAM type: YTN; PAM sequence: CTC
  source 1..20: mol_type = other DNA
cgtctcaaaaaaaaaaaaaa

SEQ ID NO: 32888 - DNA, 20 bp, synthetic construct
  misc_feature 1..20: note = Description of Artificial Sequence: Synthetic oligonucleotide
  misc_feature 1..20: note = Target: FXN; (+) strand; PAM type: YTN; PAM sequence: CTC
  source 1..20: mol_type = other DNA
aaaaaaaaaaaaaaaaaaag

SEQ ID NO: 32889 - DNA, 20 bp, synthetic construct
  misc_feature 1..20: note = Description of Artificial Sequence: Synthetic oligonucleotide
  misc_feature 1..20: note = Target: FXN; (+) strand; PAM type: YTN; PAM sequence: CTG
  source 1..20: mol_type = other DNA
atgggtcatagcatgtaaat

SEQ ID NO: 32890 - DNA, 20 bp, synthetic construct
  misc_feature 1..20: note = Description of Artificial Sequence: Synthetic oligonucleotide
  misc_feature 1..20: note = Target: FXN; (+) strand; PAM type: YTN; PAM sequence: TTC
  source 1..20: mol_type = other DNA
aactttagtagatactgtcc

SEQ ID NO: 32891 - DNA, 20 bp, synthetic construct
  misc_feature 1..20: note = Description of Artificial Sequence: Synthetic oligonucleotide
  misc_feature 1..20: note = Target: FXN; (+) strand; PAM type: YTN; PAM sequence: CTT
  source 1..20: mol_type = other DNA
tagtagatactgtccaacag

SEQ ID NO: 32892 - DNA, 20 bp, synthetic construct
  misc_feature 1..20: note = Description of Artificial Sequence: Synthetic oligonucleotide
  misc_feature 1..20: note = Target: FXN; (+) strand; PAM type: YTN; PAM sequence: TTT
  source 1..20: mol_type = other DNA
agtagatactgtccaacagt

SEQ ID NO: 32893 - DNA, 20 bp, synthetic construct
  misc_feature 1..20: note = Description of Artificial Sequence: Synthetic oligonucleotide
  misc_feature 1..20: note = Target: FXN; (+) strand; PAM type: YTN; PAM sequence: TTA
  source 1..20: mol_type = other DNA
gtagatactgtccaacagtt

SEQ ID NO: 32894 - DNA, 20 bp, synthetic construct
  misc_feature 1..20: note = Description of Artificial Sequence: Synthetic oligonucleotide
  misc_feature 1..20: note = Target: FXN; (+) strand; PAM type: YTN; PAM sequence: CTG
  source 1..20: mol_type = other DNA
tccaacagttttccaaagtg

SEQ ID NO: 32895 - DNA, 20 bp, synthetic construct
  misc_feature 1..20: note = Description of Artificial Sequence: Synthetic oligonucleotide
  misc_feature 1..20: note = Target: FXN; (+) strand; PAM type: YTN; PAM sequence: TTT
  source 1..20: mol_type = other DNA
tccaaagtgattgtccaact

SEQ ID NO: 32896 - DNA, 20 bp, synthetic construct
  misc_feature 1..20: note = Description of Artificial Sequence: Synthetic oligonucleotide
  misc_feature 1..20: note = Target: FXN; (+) strand; PAM type: YTN; PAM sequence: TTT
  source 1..20: mol_type = other DNA
ccaaagtgattgtccaactt

SEQ ID NO: 32897 - DNA, 20 bp, synthetic construct
  misc_feature 1..20: note = Description of Artificial Sequence: Synthetic oligonucleotide
  misc_feature 1..20: note = Target: FXN; (+) strand; PAM type: YTN; PAM sequence: TTC
  source 1..20: mol_type = other DNA
caaagtgattgtccaactta

SEQ ID NO: 32898 - DNA, 20 bp, synthetic construct
  misc_feature 1..20: note = Description of Artificial Sequence: Synthetic oligonucleotide
  misc_feature 1..20: note = Target: FXN; (+) strand; PAM type: YTN; PAM sequence: TTG
  source 1..20: mol_type = other DNA
tccaacttacttgcctatca

SEQ ID NO: 32899 - DNA, 20 bp, synthetic construct
  misc_feature 1..20: note = Description of Artificial Sequence: Synthetic oligonucleotide
  misc_feature 1..20: note = Target: FXN; (+) strand; PAM type: YTN; PAM sequence: CTT
  source 1..20: mol_type = other DNA
acttgcctatcagcagtatc

SEQ ID NO: 32900 - DNA, 20 bp, synthetic construct
  misc_feature 1..20: note = Description of Artificial Sequence: Synthetic oligonucleotide
  misc_feature 1..20: note = Target: FXN; (+) strand; PAM type: YTN; PAM sequence: TTA
  source 1..20: mol_type = other DNA
cttgcctatcagcagtatct

SEQ ID NO: 32901 - DNA, 20 bp, synthetic construct
  misc_feature 1..20: note = Description of Artificial Sequence: Synthetic oligonucleotide
  misc_feature 1..20: note = Target: FXN; (+) strand; PAM type: YTN; PAM sequence: CTT
  source 1..20: mol_type = other DNA
gcctatcagcagtatctgaa

SEQ ID NO: 32902 - DNA, 20 bp, synthetic construct
  misc_feature 1..20: note = Description of Artificial Sequence: Synthetic oligonucleotide
  misc_feature 1..20: note = Target: FXN; (+) strand; PAM type: YTN; PAM sequence: TTG
  source 1..20: mol_type = other DNA
cctatcagcagtatctgaaa

SEQ ID NO: 32903 - DNA, 20 bp, synthetic construct
  misc_feature 1..20: note = Description of Artificial Sequence: Synthetic oligonucleotide
  misc_feature 1..20: note = Target: FXN; (+) strand; PAM type: YTN; PAM sequence: CTA
  source 1..20: mol_type = other DNA
tcagcagtatctgaaaagtc

SEQ ID NO: 32904 - DNA, 20 bp, synthetic construct
  misc_feature 1..20: note = Description of Artificial Sequence: Synthetic oligonucleotide
  misc_feature 1..20: note = Target: FXN; (+) strand; PAM type: YTN; PAM sequence: CTG
  source 1..20: mol_type = other DNA
aaaagtctagttgcttcttt

SEQ ID NO: 32905 - DNA, 20 bp, synthetic construct
  misc_feature 1..20: note = Description of Artificial Sequence: Synthetic oligonucleotide
  misc_feature 1..20: note = Target: FXN; (+) strand; PAM type: YTN; PAM sequence: CTA
  source 1..20: mol_type = other DNA
gttgcttcttttcttggcca

SEQ ID NO: 32906 - DNA, 20 bp, synthetic construct
  misc_feature 1..20: note = Description of Artificial Sequence: Synthetic oligonucleotide
  misc_feature 1..20: note = Target: FXN; (+) strand; PAM type: YTN; PAM sequence: TTG
  source 1..20: mol_type = other DNA
cttcttttcttggccaactc

SEQ ID NO: 32907 - DNA, 20 bp, synthetic construct
  misc_feature 1..20: note = Description of Artificial Sequence: Synthetic oligonucleotide
  misc_feature 1..20: note = Target: FXN; (+) strand; PAM type: YTN; PAM sequence: CTT
  source 1..20: mol_type = other DNA
cttttcttggccaactcttt

SEQ ID NO: 32908 - DNA, 20 bp, synthetic construct
  misc_feature 1..20: note = Description of Artificial Sequence: Synthetic oligonucleotide
  misc_feature 1..20: note = Target: FXN; (+) strand; PAM type: YTN; PAM sequence: TTC
  source 1..20: mol_type = other DNA
ttttcttggccaactctttt

SEQ ID NO: 32909 - DNA, 20 bp, synthetic construct
  misc_feature 1..20: note = Description of Artificial Sequence: Synthetic oligonucleotide
  misc_feature 1..20: note = Target: FXN; (+) strand; PAM type: YTN; PAM sequence: CTT
  source 1..20: mol_type = other DNA
ttcttggccaactctttttt

SEQ ID NO: 32910 - DNA, 20 bp, synthetic construct
  misc_feature 1..20: note = Description of Artificial Sequence: Synthetic oligonucleotide
  misc_feature 1..20: note = Target: FXN; (+) strand; PAM type: YTN; PAM sequence: TTT
  source 1..20: mol_type = other DNA
tcttggccaactcttttttt

SEQ ID NO: 32911 - DNA, 20 bp, synthetic construct
  misc_feature 1..20: note = Description of Artificial Sequence: Synthetic oligonucleotide
  misc_feature 1..20: note = Target: FXN; (+) strand; PAM type: YTN; PAM sequence: TTT
  source 1..20: mol_type = other DNA
cttggccaactctttttttt

SEQ ID NO: 32912 - DNA, 20 bp, synthetic construct
  misc_feature 1..20: note = Description of Artificial Sequence: Synthetic oligonucleotide
  misc_feature 1..20: note = Target: FXN; (+) strand; PAM type: YTN; PAM sequence: TTC
  source 1..20: mol_type = other DNA
ttggccaactcttttttttt

SEQ ID NO: 32913 - DNA, 20 bp, synthetic construct
  misc_feature 1..20: note = Description of Artificial Sequence: Synthetic oligonucleotide
  misc_feature 1..20: note = Target: FXN; (+) strand; PAM type: YTN; PAM sequence: CTT
  source 1..20: mol_type = other DNA
ggccaactcttttttttttt

SEQ ID NO: 32914 - DNA, 20 bp, synthetic construct
  misc_feature 1..20: note = Description of Artificial Sequence: Synthetic oligonucleotide
  misc_feature 1..20: note = Target: FXN; (+) strand; PAM type: YTN; PAM sequence: TTG
  source 1..20: mol_type = other DNA
gccaactctttttttttttt

SEQ ID NO: 32915 - DNA, 20 bp, synthetic construct
  misc_feature 1..20: note = Description of Artificial Sequence: Synthetic oligonucleotide
  misc_feature 1..20: note = Target: FXN; (+) strand; PAM type: YTN; PAM sequence: CTC
  source 1..20: mol_type = other DNA
tttttttttttttgagatgg

SEQ ID NO: 32916 - DNA, 20 bp, synthetic construct
  misc_feature 1..20: note = Description of Artificial Sequence: Synthetic oligonucleotide
  misc_feature 1..20: note = Target: FXN; (+) strand; PAM type: YTN; PAM sequence: CTT
  source 1..20: mol_type = other DNA
tttttttttttgagatggag

SEQ ID NO: 32917 - DNA, 20 bp, synthetic construct
  misc_feature 1..20: note = Description of Artificial Sequence: Synthetic oligonucleotide
  misc_feature 1..20: note = Target: FXN; (+) strand; PAM type: YTN; PAM sequence: TTT
  source 1..20: mol_type = other DNA
ttttttttttgagatggagt

SEQ ID NO: 32918 - DNA, 20 bp, synthetic construct
  misc_feature 1..20: note = Description of Artificial Sequence: Synthetic oligonucleotide
  misc_feature 1..20: note = Target: FXN; (+) strand; PAM type: YTN; PAM sequence: TTT
  source 1..20: mol_type = other DNA
tttttttttgagatggagtt

SEQ ID NO: 32919 - DNA, 20 bp, synthetic construct
  misc_feature 1..20: note = Description of Artificial Sequence: Synthetic oligonucleotide
  misc_feature 1..20: note = Target: FXN; (+) strand; PAM type: YTN; PAM sequence: TTT
  source 1..20: mol_type = other DNA
ttttttttgagatggagttt

SEQ ID NO: 32920 - DNA, 20 bp, synthetic construct
  misc_feature 1..20: note = Description of Artificial Sequence: Synthetic oligonucleotide
  misc_feature 1..20: note = Target: FXN; (+) strand; PAM type: YTN; PAM sequence: TTT
  source 1..20: mol_type = other DNA
tttttttgagatggagtttt

SEQ ID NO: 32921 - DNA, 20 bp, synthetic construct
  misc_feature 1..20: note = Description of Artificial Sequence: Synthetic oligonucleotide
  misc_feature 1..20: note = Target: FXN; (+) strand; PAM type: YTN; PAM sequence: TTT
  source 1..20: mol_type = other DNA
ttttttgagatggagttttg

SEQ ID NO: 32922 - DNA, 20 bp, synthetic construct
  misc_feature 1..20: note = Description of Artificial Sequence: Synthetic oligonucleotide
  misc_feature 1..20: note = Target: FXN; (+) strand; PAM type: YTN; PAM sequence: TTT
  source 1..20: mol_type = other DNA
tttttgagatggagttttgc

SEQ ID NO: 32923 - DNA, 20 bp, synthetic construct
  misc_feature 1..20: note = Description of Artificial Sequence: Synthetic oligonucleotide
  misc_feature 1..20: note = Target: FXN; (+) strand; PAM type: YTN; PAM sequence: TTT
  source 1..20: mol_type = other DNA
ttttgagatggagttttgct

SEQ ID NO: 32924 - DNA, 20 bp, synthetic construct
  misc_feature 1..20: note = Description of Artificial Sequence: Synthetic oligonucleotide
  misc_feature 1..20: note = Target: FXN; (+) strand; PAM type: YTN; PAM sequence: TTT
  source 1..20: mol_type = other DNA
tttgagatggagttttgctc

SEQ ID NO: 32925 - DNA, 20 bp, synthetic construct
  misc_feature 1..20: note = Description of Artificial Sequence: Synthetic oligonucleotide
  misc_feature 1..20: note = Target: FXN; (+) strand; PAM type: YTN; PAM sequence: TTT
  source 1..20: mol_type = other DNA
ttgagatggagttttgctct

SEQ ID NO: 32926 - DNA, 20 bp, synthetic construct
  misc_feature 1..20: note = Description of Artificial Sequence: Synthetic oligonucleotide
  misc_feature 1..20: note = Target: FXN; (+) strand; PAM type: YTN; PAM sequence: TTT
  source 1..20: mol_type = other DNA
tgagatggagttttgctctt

SEQ ID NO: 32927 - DNA, 20 bp, synthetic construct
  misc_feature 1..20: note = Description of Artificial Sequence: Synthetic oligonucleotide
  misc_feature 1..20: note = Target: FXN; (+) strand; PAM type: YTN; PAM sequence: TTT
  source 1..20: mol_type = other DNA
gagatggagttttgctcttg

SEQ ID NO: 32928 - DNA, 20 bp, synthetic construct
  misc_feature 1..20: note = Description of Artificial Sequence: Synthetic oligonucleotide
  misc_feature 1..20: note = Target: FXN; (+) strand; PAM type: YTN; PAM sequence: TTG
  source 1..20: mol_type = other DNA
agatggagttttgctcttgt

SEQ ID NO: 32929 - DNA, 20 bp, synthetic construct
  misc_feature 1..20: note = Description of Artificial Sequence: Synthetic oligonucleotide
  misc_feature 1..20: note = Target: FXN; (+) strand; PAM type: YTN; PAM sequence: TTT
  source 1..20: mol_type = other DNA
tgctcttgttgcccaggctg

SEQ ID NO: 32930 - DNA, 20 bp, synthetic construct
  misc_feature 1..20: note = Description of Artificial Sequence: Synthetic oligonucleotide
  misc_feature 1..20: note = Target: FXN; (+) strand; PAM type: YTN; PAM sequence: TTT
  source 1..20: mol_type = other DNA
gctcttgttgcccaggctgg

SEQ ID NO: 32931 - DNA, 20 bp, synthetic construct
  misc_feature 1..20: note = Description of Artificial Sequence: Synthetic oligonucleotide
  misc_feature 1..20: note = Target: FXN; (+) strand; PAM type: YTN; PAM sequence: TTG
  source 1..20: mol_type = other DNA
ctcttgttgcccaggctgga

SEQ ID NO: 32932 - DNA, 20 bp, synthetic construct
  misc_feature 1..20: note = Description of Artificial Sequence: Synthetic oligonucleotide
  misc_feature 1..20: note = Target: FXN; (+) strand; PAM type: YTN; PAM sequence: CTC
  source 1..20: mol_type = other DNA
ttgttgcccaggctggagcg

SEQ ID NO: 32933 - DNA, 20 bp, synthetic construct
  misc_feature 1..20: note = Description of Artificial Sequence: Synthetic oligonucleotide
  misc_feature 1..20: note = Target: FXN; (+) strand; PAM type: YTN; PAM sequence: CTT
  source 1..20: mol_type = other DNA
gttgcccaggctggagcgca

SEQ ID NO: 32934 - DNA, 20 bp, synthetic construct
  misc_feature 1..20: note = Description of Artificial Sequence: Synthetic oligonucleotide
  misc_feature 1..20: note = Target: FXN; (+) strand; PAM type: YTN; PAM sequence: TTG
  source 1..20: mol_type = other DNA
ttgcccaggctggagcgcaa

SEQ ID NO: 32935 - DNA, 20 bp, synthetic construct
  misc_feature 1..20: note = Description of Artificial Sequence: Synthetic oligonucleotide
  misc_feature 1..20: note = Target: FXN; (+) strand; PAM type: YTN; PAM sequence: TTG
  source 1..20: mol_type = other DNA
cccaggctggagcgcaatgg

SEQ ID NO: 32936 - DNA, 20 bp, synthetic construct
  misc_feature 1..20: note = Description of Artificial Sequence: Synthetic oligonucleotide
  misc_feature 1..20: note = Target: FXN; (+) strand; PAM type: YTN; PAM sequence: CTG
  source 1..20: mol_type = other DNA
gagcgcaatggcacgtcctc

SEQ ID NO: 32937 - DNA, 20 bp, synthetic construct
  misc_feature 1..20: note = Description of Artificial Sequence: Synthetic oligonucleotide
  misc_feature 1..20: note = Target: FXN; (+) strand; PAM type: YTN; PAM sequence: CTC
  source 1..20: mol_type = other DNA
tgctcactgcaacctccgcc

SEQ ID NO: 32938 - DNA, 20 bp, synthetic construct
  misc_feature 1..20: note = Description of Artificial Sequence: Synthetic oligonucleotide
  misc_feature 1..20: note = Target: FXN; (+) strand; PAM type: YTN; PAM sequence: CTG
  source 1..20: mol_type = other DNA
ctcactgcaacctccgcctc

SEQ ID NO: 32939 - DNA, 20 bp, synthetic construct
  misc_feature 1..20: note = Description of Artificial Sequence: Synthetic oligonucleotide
  misc_feature 1..20: note = Target: FXN; (+) strand; PAM type: YTN; PAM sequence: CTC
  source 1..20: mol_type = other DNA
actgcaacctccgcctcctg

SEQ ID NO: 32940 - DNA, 20 bp, synthetic construct
  misc_feature 1..20: note = Description of Artificial Sequence: Synthetic oligonucleotide
  misc_feature 1..20: note = Target: FXN; (+) strand; PAM type: YTN; PAM sequence: CTG
  source 1..20: mol_type = other DNA
caacctccgcctcctgggtt

SEQ ID NO: 32941 - DNA, 20 bp, synthetic construct
  misc_feature 1..20: note = Description of Artificial Sequence: Synthetic oligonucleotide
  misc_feature 1..20: note = Target: FXN; (+) strand; PAM type: YTN; PAM sequence: CTC
  source 1..20: mol_type = other DNA
cgcctcctgggttcaagcaa

SEQ ID NO: 32942 - DNA, 20 bp, synthetic construct
  misc_feature 1..20: note = Description of Artificial Sequence: Synthetic oligonucleotide
  misc_feature 1..20: note = Target: FXN; (+) strand; PAM type: YTN; PAM sequence: CTC
  source 1..20: mol_type = other DNA
ctgggttcaagcaattctcc

SEQ ID NO: 32943 - DNA, 20 bp, synthetic construct
  misc_feature 1..20: note = Description of Artificial Sequence: Synthetic oligonucleotide
  misc_feature 1..20: note = Target: FXN; (+) strand; PAM type: YTN; PAM sequence: CTG
  source 1..20: mol_type = other DNA
ggttcaagcaattctcctgc

SEQ ID NO: 32944 - DNA, 20 bp, synthetic construct
  misc_feature 1..20: note = Description of Artificial Sequence: Synthetic oligonucleotide
  misc_feature 1..20: note = Target: FXN; (+) strand; PAM type: YTN; PAM sequence: TTC
  source 1..20: mol_type = other DNA
aagcaattctcctgcctcag

SEQ ID NO: 32945 - DNA, 20 bp, synthetic construct
  misc_feature 1..20: note = Description of Artificial Sequence: Synthetic oligonucleotide
  misc_feature 1..20: note = Target: FXN; (+) strand; PAM type: YTN; PAM sequence: TTC
  source 1..20: mol_type = other DNA
tcctgcctcagcctcccgag

SEQ ID NO: 32946 - DNA, 20 bp, synthetic construct
  misc_feature 1..20: note = Description of Artificial Sequence: Synthetic oligonucleotide
  misc_feature 1..20: note = Target: FXN; (+) strand; PAM type: YTN; PAM sequence: CTC
  source 1..20: mol_type = other DNA
ctgcctcagcctcccgagta

SEQ ID NO: 32947 - DNA, 20 bp, synthetic construct
  misc_feature 1..20: note = Description of Artificial Sequence: Synthetic oligonucleotide
  misc_feature 1..20: note = Target: FXN; (+) strand; PAM type: YTN; PAM sequence: CTG
  source 1..20: mol_type = other DNA
cctcagcctcccgagtagct

SEQ ID NO: 32948 - DNA, 20 bp, synthetic construct
  misc_feature 1..20: note = Description of Artificial Sequence: Synthetic oligonucleotide
  misc_feature 1..20: note = Target: FXN; (+) strand; PAM type: YTN; PAM sequence: CTC
  source 1..20: mol_type = other DNA
agcctcccgagtagctggga

SEQ ID NO: 32949 - DNA, 20 bp, synthetic construct
  misc_feature 1..20: note = Description of Artificial Sequence: Synthetic oligonucleotide
  misc_feature 1..20: note = Target: FXN; (+) strand; PAM type: YTN; PAM sequence: CTC
  source 1..20: mol_type = other DNA
ccgagtagctgggattacag

SEQ ID NO: 32950 - DNA, 20 bp, synthetic construct
  misc_feature 1..20: note = Description of Artificial Sequence: Synthetic oligonucleotide
  misc_feature 1..20: note = Target: FXN; (+) strand; PAM type: YTN; PAM sequence: CTG
  source 1..20: mol_type = other DNA
ggattacaggcatgcgccac

SEQ ID NO: 32951 - DNA, 20 bp, synthetic construct
  misc_feature 1..20: note = Description of Artificial Sequence: Synthetic oligonucleotide
  misc_feature 1..20: note = Target: FXN; (+) strand; PAM type: YTN; PAM sequence: TTA
  source 1..20: mol_type = other DNA
caggcatgcgccactatgcc

SEQ ID NO: 32952 - DNA, 20 bp, synthetic construct
  misc_feature 1..20: note = Description of Artificial Sequence: Synthetic oligonucleotide
  misc_feature 1..20: note = Target: FXN; (+) strand; PAM type: YTN; PAM sequence: CTA
  source 1..20: mol_type = other DNA
tgcccggctaattttgtatt

SEQ ID NO: 32953 - DNA, 20 bp, synthetic construct
  misc_feature 1..20: note = Description of Artificial Sequence: Synthetic oligonucleotide
  misc_feature 1..20: note = Target: FXN; (+) strand; PAM type: YTN; PAM sequence: CTA
  source 1..20: mol_type = other DNA
attttgtatttttagtagag

SEQ ID NO: 32954 - DNA, 20 bp, synthetic construct
  misc_feature 1..20: note = Description of Artificial Sequence: Synthetic oligonucleotide
  misc_feature 1..20: note = Target: FXN; (+) strand; PAM type: YTN; PAM sequence: TTT
  source 1..20: mol_type = other DNA
tgtatttttagtagagacag

SEQ ID NO: 32955 - DNA, 20 bp, synthetic construct
  misc_feature 1..20: note = Description of Artificial Sequence: Synthetic oligonucleotide
  misc_feature 1..20: note = Target: FXN; (+) strand; PAM type: YTN; PAM sequence: TTT
  source 1..20: mol_type = other DNA
gtatttttagtagagacagg

SEQ ID NO: 32956 - DNA, 20 bp, synthetic construct
  misc_feature 1..20: note = Description of Artificial Sequence: Synthetic oligonucleotide
  misc_feature 1..20: note = Target: FXN; (+) strand; PAM type: YTN; PAM sequence: TTG
  source 1..20: mol_type = other DNA
tatttttagtagagacaggg

SEQ ID NO: 32957 - DNA, 20 bp, synthetic construct
  misc_feature 1..20: note = Description of Artificial Sequence: Synthetic oligonucleotide
  misc_feature 1..20: note = Target: FXN; (+) strand; PAM type: YTN; PAM sequence: TTT
  source 1..20: mol_type = other DNA
ttagtagagacagggtttct

SEQ ID NO: 32958 - DNA, 20 bp, synthetic construct
  misc_feature 1..20: note = Description of Artificial Sequence: Synthetic oligonucleotide
  misc_feature 1..20: note = Target: FXN; (+) strand; PAM type: YTN; PAM sequence: TTT
  source 1..20: mol_type = other DNA
tagtagagacagggtttctc

SEQ ID NO: 32959 - DNA, 20 bp, synthetic construct
  misc_feature 1..20: note = Description of Artificial Sequence: Synthetic oligonucleotide
  misc_feature 1..20: note = Target: FXN; (+) strand; PAM type: YTN; PAM sequence: TTT
  source 1..20: mol_type = other DNA
agtagagacagggtttctcc

SEQ ID NO: 32960 - DNA, 20 bp, synthetic construct
  misc_feature 1..20: note = Description of Artificial Sequence: Synthetic oligonucleotide
  misc_feature 1..20: note = Target: FXN; (+) strand; PAM type: YTN; PAM sequence: TTA
  source 1..20: mol_type = other DNA
gtagagacagggtttctcca

SEQ ID NO: 32961 - DNA, 20 bp, synthetic construct
  misc_feature 1..20: note = Description of Artificial Sequence: Synthetic oligonucleotide
  misc_feature 1..20: note = Target: FXN; (+) strand; PAM type: YTN; PAM sequence: TTT
  source 1..20: mol_type = other DNA
ctccatgttggtcaagctgg

SEQ ID NO: 32962 - DNA, 20 bp, synthetic construct
  misc_feature 1..20: note = Description of Artificial Sequence: Synthetic oligonucleotide
  misc_feature 1..20: note = Target: FXN; (+) strand; PAM type: YTN; PAM sequence: TTC
  source 1..20: mol_type = other DNA
tccatgttggtcaagctggt

SEQ ID NO: 32963 - DNA, 20 bp, synthetic construct
  misc_feature 1..20: note = Description of Artificial Sequence: Synthetic oligonucleotide
  misc_feature 1..20: note = Target: FXN; (+) strand; PAM type: YTN; PAM sequence: CTC
  source 1..20: mol_type = other DNA
catgttggtcaagctggtct

SEQ ID NO: 32964 - DNA, 20 bp, synthetic construct
  misc_feature 1..20: note = Description of Artificial Sequence: Synthetic oligonucleotide
  misc_feature 1..20: note = Target: FXN; (+) strand; PAM type: YTN; PAM sequence: TTG
  source 1..20: mol_type = other DNA
gtcaagctggtctcgaactc

SEQ ID NO: 32965 - DNA, 20 bp, synthetic construct
  misc_feature 1..20: note = Description of Artificial Sequence: Synthetic oligonucleotide
  misc_feature 1..20: note = Target: FXN; (+) strand; PAM type: YTN; PAM sequence: CTG
  source 1..20: mol_type = other DNA
gtctcgaactcctaacctca

SEQ ID NO: 32966 - DNA, 20 bp, synthetic construct
  misc_feature 1..20: note = Description of Artificial Sequence: Synthetic oligonucleotide
  misc_feature 1..20: note = Target: FXN; (+) strand; PAM type: YTN; PAM sequence: CTC
  source 1..20: mol_type = other DNA
gaactcctaacctcaggtga

SEQ ID NO: 32967 - DNA, 20 bp, synthetic construct
  misc_feature 1..20: note = Description of Artificial Sequence: Synthetic oligonucleotide
  misc_feature 1..20: note = Target: FXN; (+) strand; PAM type: YTN; PAM sequence: CTC
  source 1..20: mol_type = other DNA
ctaacctcaggtgatccgcc

SEQ ID NO: 32968 - DNA, 20 bp, synthetic construct
  misc_feature 1..20: note = Description of Artificial Sequence: Synthetic oligonucleotide
  misc_feature 1..20: note = Target: FXN; (+) strand; PAM type: YTN; PAM sequence: CTA
  source 1..20: mol_type = other DNA
acctcaggtgatccgcccgc

SEQ ID NO: 32969 - DNA, 20 bp, synthetic construct
  misc_feature 1..20: note = Description of Artificial Sequence: Synthetic oligonucleotide
  misc_feature 1..20: note = Target: FXN; (+) strand; PAM type: YTN; PAM sequence: CTC
  source 1..20: mol_type = other DNA
aggtgatccgcccgcctcgg

SEQ ID NO: 32970 - DNA, 20 bp, synthetic construct
  misc_feature 1..20: note = Description of Artificial Sequence: Synthetic oligonucleotide
  misc_feature 1..20: note = Target: FXN; (+) strand; PAM type: YTN; PAM sequence: CTC
  source 1..20: mol_type = other DNA
ggcctcccgaagtgctggga

SEQ ID NO: 32971 - DNA, 20 bp, synthetic construct
  misc_feature 1..20: note = Description of Artificial Sequence: Synthetic oligonucleotide
  misc_feature 1..20: note = Target: FXN; (+) strand; PAM type: YTN; PAM sequence: CTC
  source 1..20: mol_type = other DNA
ccgaagtgctgggattacag

SEQ ID NO: 32972 - DNA, 20 bp, synthetic construct
  misc_feature 1..20: note = Description of Artificial Sequence: Synthetic oligonucleotide
  misc_feature 1..20: note = Target: FXN; (+) strand; PAM type: YTN; PAM sequence: CTG
  source 1..20: mol_type = other DNA
ggattacaggcatgagccac

SEQ ID NO: 32973 - DNA, 20 bp, synthetic construct
  misc_feature 1..20: note = Description of Artificial Sequence: Synthetic oligonucleotide
  misc_feature 1..20: note = Target: FXN; (+) strand; PAM type: YTN; PAM sequence: TTA
  source 1..20: mol_type = other DNA
caggcatgagccaccgcgcc

SEQ ID NO: 32974 - DNA, 20 bp, synthetic construct
  misc_feature 1..20: note = Description of Artificial Sequence: Synthetic oligonucleotide
  misc_feature 1..20: note = Target: FXN; (+) strand; PAM type: YTN; PAM sequence: CTC
  source 1..20: mol_type = other DNA
ttttttattttattttattt

SEQ ID NO: 32975 - DNA, 20 bp, synthetic construct
  misc_feature 1..20: note = Description of Artificial Sequence: Synthetic oligonucleotide
  misc_feature 1..20: note = Target: FXN; (+) strand; PAM type: YTN; PAM sequence: CTT
  source 1..20: mol_type = other DNA
ttttattttattttatttta

SEQ ID NO: 32976 - DNA, 20 bp, synthetic construct
  misc_feature 1..20: note = Description of Artificial Sequence: Synthetic oligonucleotide
  misc_feature 1..20: note = Target: FXN; (+) strand; PAM type: YTN; PAM sequence: TTT
  source 1..20: mol_type = other DNA
tttattttattttattttac

SEQ ID NO: 32977 - DNA, 20 bp, synthetic construct
  misc_feature 1..20: note = Description of Artificial Sequence: Synthetic oligonucleotide
  misc_feature 1..20: note = Target: FXN; (+) strand; PAM type: YTN; PAM sequence: TTT
  source 1..20: mol_type = other DNA
ttattttattttattttact

SEQ ID NO: 32978 - DNA, 20 bp, synthetic construct
  misc_feature 1..20: note = Description of Artificial Sequence: Synthetic oligonucleotide
  misc_feature 1..20: note = Target: FXN; (+) strand; PAM type: YTN; PAM sequence: TTT
  source 1..20: mol_type = other DNA
tattttattttattttactt

SEQ ID NO: 32979 - DNA, 20 bp, synthetic construct
  misc_feature 1..20: note = Description of Artificial Sequence: Synthetic oligonucleotide
  misc_feature 1..20: note = Target: FXN; (+) strand; PAM type: YTN; PAM sequence: TTT
  source 1..20: mol_type = other DNA
attttattttattttacttt

SEQ ID NO: 32980 - DNA, 20 bp, synthetic construct
  misc_feature 1..20: note = Description of Artificial Sequence: Synthetic oligonucleotide
  misc_feature 1..20: note = Target: FXN; (+) strand; PAM type: YTN; PAM sequence: TTA
  source 1..20: mol_type = other DNA
ttttattttattttacttta

SEQ ID NO: 32981 - DNA, 20 bp, synthetic construct
  misc_feature 1..20: note = Description of Artificial Sequence: Synthetic oligonucleotide
  misc_feature 1..20: note = Target: FXN; (+) strand; PAM type: YTN; PAM sequence: TTT
  source 1..20: mol_type = other DNA
tattttattttactttaaag

SEQ ID NO: 32982 - DNA, 20 bp, synthetic construct
  misc_feature 1..20: note = Description of Artificial Sequence: Synthetic oligonucleotide
  misc_feature 1..20: note = Target: FXN; (+) strand; PAM type: YTN; PAM sequence: TTT
  source 1..20: mol_type = other DNA
attttattttactttaaaga

SEQ ID NO: 32983 - DNA, 20 bp, synthetic construct
  misc_feature 1..20: note = Description of Artificial Sequence: Synthetic oligonucleotide
  misc_feature 1..20: note = Target: FXN; (+) strand; PAM type: YTN; PAM sequence: TTA
  source 1..20: mol_type = other DNA
ttttattttactttaaagac

SEQ ID NO: 32984 - DNA, 20 bp, synthetic construct
  misc_feature 1..20: note = Description of Artificial Sequence: Synthetic oligonucleotide
  misc_feature 1..20: note = Target: FXN; (+) strand; PAM type: YTN; PAM sequence: TTT
  source 1..20: mol_type = other DNA
tattttactttaaagacagg

SEQ ID NO: 32985 - DNA, 20 bp, synthetic construct
  misc_feature 1..20: note = Description of Artificial Sequence: Synthetic oligonucleotide
  misc_feature 1..20: note = Target: FXN; (+) strand; PAM type: YTN; PAM sequence: TTT
  source 1..20: mol_type = other DNA
attttactttaaagacaggg

SEQ ID NO: 32986 - DNA, 20 bp, synthetic construct
  misc_feature 1..20: note = Description of Artificial Sequence: Synthetic oligonucleotide
  misc_feature 1..20: note = Target: FXN; (+) strand; PAM type: YTN; PAM sequence: TTA
  source 1..20: mol_type = other DNA
ttttactttaaagacagggt

SEQ ID NO: 32987 - DNA, 20 bp, synthetic construct
  misc_feature 1..20: note = Description of Artificial Sequence: Synthetic oligonucleotide
  misc_feature 1..20: note = Target: FXN; (+) strand; PAM type: YTN; PAM sequence: TTT
  source 1..20: mol_type = other DNA
tactttaaagacagggtttc

SEQ ID NO: 32988 - DNA, 20 bp, synthetic construct
  misc_feature 1..20: note = Description of Artificial Sequence: Synthetic oligonucleotide
  misc_feature 1..20: note = Target: FXN; (+) strand; PAM type: YTN; PAM sequence: TTT
  source 1..20: mol_type = other DNA
actttaaagacagggtttca

SEQ ID NO: 32989 - DNA, 20 bp, synthetic construct
  misc_feature 1..20: note = Description of Artificial Sequence: Synthetic oligonucleotide
  misc_feature 1..20: note = Target: FXN; (+) strand; PAM type: YTN; PAM sequence: TTA
  source 1..20: mol_type = other DNA
ctttaaagacagggtttcac

SEQ ID NO: 32990 - DNA, 20 bp, synthetic construct
  misc_feature 1..20: note = Description of Artificial Sequence: Synthetic oligonucleotide
  misc_feature 1..20: note = Target: FXN; (+) strand; PAM type: YTN; PAM sequence: CTT
  source 1..20: mol_type = other DNA
taaagacagggtttcacttt

SEQ ID NO: 32991 - DNA, 20 bp, synthetic construct
  misc_feature 1..20: note = Description of Artificial Sequence: Synthetic oligonucleotide
  misc_feature 1..20: note = Target: FXN; (+) strand; PAM type: YTN; PAM sequence: TTT
  source 1..20: mol_type = other DNA
aaagacagggtttcactttg

SEQ ID NO: 32992 - DNA, 20 bp, synthetic construct
  misc_feature 1..20: note = Description of Artificial Sequence: Synthetic oligonucleotide
  misc_feature 1..20: note = Target: FXN; (+) strand; PAM type: YTN; PAM sequence: TTA
  source 1..20: mol_type = other DNA
aagacagggtttcactttgt

SEQ ID NO: 32993 - DNA, 20 bp, synthetic construct
  misc_feature 1..20: note = Description of Artificial Sequence: Synthetic oligonucleotide
  misc_feature 1..20: note = Target: FXN; (+) strand; PAM type: YTN; PAM sequence: TTT
  source 1..20: mol_type = other DNA
cactttgtcacccaggatgg

SEQ ID NO: 32994 - DNA, 20 bp, synthetic construct
  misc_feature 1..20: note = Description of Artificial Sequence: Synthetic oligonucleotide
  misc_feature 1..20: note = Target: FXN; (+) strand; PAM type: YTN; PAM sequence: TTC
  source 1..20: mol_type = other DNA
actttgtcacccaggatgga

SEQ ID NO: 32995 - DNA, 20 bp, synthetic construct
  misc_feature 1..20: note = Description of Artificial Sequence: Synthetic oligonucleotide
  misc_feature 1..20: note = Target: FXN; (+) strand; PAM type: YTN; PAM sequence: CTT
  source 1..20: mol_type = other DNA
tgtcacccaggatggaatgc

SEQ ID NO: 32996 - DNA, 20 bp, synthetic construct
  misc_feature 1..20: note = Description of Artificial Sequence: Synthetic oligonucleotide
  misc_feature 1..20: note = Target: FXN; (+) strand; PAM type: YTN; PAM sequence: TTT
  source 1..20: mol_type = other DNA
gtcacccaggatggaatgca

SEQ ID NO: 32997 - DNA, 20 bp, synthetic construct
  misc_feature 1..20: note = Description of Artificial Sequence: Synthetic oligonucleotide
  misc_feature 1..20: note = Target: FXN; (+) strand; PAM type: YTN; PAM sequence: TTG
  source 1..20: mol_type = other DNA
tcacccaggatggaatgcaa

SEQ ID NO: 32998 - DNA, 20 bp, synthetic construct
  misc_feature 1..20: note = Description of Artificial Sequence: Synthetic oligonucleotide
  misc_feature 1..20: note = Target: FXN; (+) strand; PAM type: YTN; PAM sequence: CTC
  source 1..20: mol_type = other DNA
actgcagccttgacctccct

SEQ ID NO: 32999 - DNA, 20 bp, synthetic construct
  misc_feature 1..20: note = Description of Artificial Sequence: Synthetic oligonucleotide
  misc_feature 1..20: note = Target: FXN; (+) strand; PAM type: YTN; PAM sequence: CTG
  source 1..20: mol_type = other DNA
cagccttgacctccctggct

SEQ ID NO: 33000 - DNA, 20 bp, synthetic construct
  misc_feature 1..20: note = Description of Artificial Sequence: Synthetic oligonucleotide
  misc_feature 1..20: note = Target: FXN; (+) strand; PAM type: YTN; PAM sequence: CTT
  source 1..20: mol_type = other DNA
gacctccctggctcgggtga

SEQ ID NO: 33001 - DNA, 20 bp, synthetic construct
  misc_feature 1..20: note = Description of Artificial Sequence: Synthetic oligonucleotide
  misc_feature 1..20: note = Target: FXN; (+) strand; PAM type: YTN; PAM sequence: TTG
  source 1..20: mol_type = other DNA
acctccctggctcgggtgat

SEQ ID NO: 33002 - DNA, 20 bp, synthetic construct
  misc_feature 1..20: note = Description of Artificial Sequence: Synthetic oligonucleotide
  misc_feature 1..20: note = Target: FXN; (+) strand; PAM type: YTN; PAM sequence: CTC
  source 1..20: mol_type = other DNA
cctggctcgggtgatccctc

SEQ ID NO: 33003 - DNA, 20 bp, synthetic construct
  misc_feature 1..20: note = Description of Artificial Sequence: Synthetic oligonucleotide
  misc_feature 1..20: note = Target: FXN; (+) strand; PAM type: YTN; PAM sequence: CTG
  source 1..20: mol_type = other DNA
gctcgggtgatccctcccac

SEQ ID NO: 33004 - DNA, 20 bp, synthetic construct
  misc_feature 1..20: note = Description of Artificial Sequence: Synthetic oligonucleotide
  misc_feature 1..20: note = Target: FXN; (+) strand; PAM type: YTN; PAM sequence: CTC
  source 1..20: mol_type = other DNA
gggtgatccctcccacctca

SEQ ID NO: 33005 - DNA, 20 bp, synthetic construct
  misc_feature 1..20: note = Description of Artificial Sequence: Synthetic oligonucleotide
  misc_feature 1..20: note = Target: FXN; (+) strand; PAM type: YTN; PAM sequence: CTC
  source 1..20: mol_type = other DNA
ccacctcaggctcctgagga

SEQ ID NO: 33006 - DNA, 20 bp, synthetic construct
  misc_feature 1..20: note = Description of Artificial Sequence: Synthetic oligonucleotide
  misc_feature 1..20: note = Target: FXN; (+) strand; PAM type: YTN; PAM sequence: CTC
  source 1..20: mol_type = other DNA
aggctcctgaggagctagaa

SEQ ID NO: 33007 - DNA, 20 bp, synthetic construct
  misc_feature 1..20: note = Description of Artificial Sequence: Synthetic oligonucleotide
  misc_feature 1..20: note = Target: FXN; (+) strand; PAM type: YTN; PAM sequence: CTC
  source 1..20: mol_type = other DNA
ctgaggagctagaactacag

SEQ ID NO: 33008 - DNA, 20 bp, synthetic construct
  misc_feature 1..20: note = Description of Artificial Sequence: Synthetic oligonucleotide
  misc_feature 1..20: note = Target: FXN; (+) strand; PAM type: YTN; PAM sequence: CTG
  source 1..20: mol_type = other DNA
aggagctagaactacaggca

SEQ ID NO: 33009 - DNA, 20 bp, synthetic construct
  misc_feature 1..20: note = Description of Artificial Sequence: Synthetic oligonucleotide
  misc_feature 1..20: note = Target: FXN; (+) strand; PAM type: YTN; PAM sequence: CTA
  source 1..20: mol_type = other DNA
gaactacaggcatgggccat

SEQ ID NO: 33010 - DNA, 20 bp, synthetic construct
  misc_feature 1..20: note = Description of Artificial Sequence: Synthetic oligonucleotide
  misc_feature 1..20: note = Target: FXN; (+) strand; PAM type: YTN; PAM sequence: CTA
  source 1..20: mol_type = other DNA
caggcatgggccatgcccag

SEQ ID NO: 33011 - DNA, 20 bp, synthetic construct
  misc_feature 1..20: note = Description of Artificial Sequence: Synthetic oligonucleotide
  misc_feature 1..20: note = Target: FXN; (+) strand; PAM type: YTN; PAM sequence: CTA
  source 1..20: mol_type = other DNA
attttttaatttttggtaga

SEQ ID NO: 33012 - DNA, 20 bp, synthetic construct
  misc_feature 1..20: note = Description of Artificial Sequence: Synthetic oligonucleotide
  misc_feature 1..20: note = Target: FXN; (+) strand; PAM type: YTN; PAM sequence: TTT
  source 1..20: mol_type = other DNA
tttaatttttggtagagacg

SEQ ID NO: 33013 - DNA, 20 bp, synthetic construct
  misc_feature 1..20: note = Description of Artificial Sequence: Synthetic oligonucleotide
  misc_feature 1..20: note = Target: FXN; (+) strand; PAM type: YTN; PAM sequence: TTT
  source 1..20: mol_type = other DNA
ttaatttttggtagagacgg

SEQ ID NO: 33014 - DNA, 20 bp, synthetic construct
  misc_feature 1..20: note = Description of Artificial Sequence: Synthetic oligonucleotide
  misc_feature 1..20: note = Target: FXN; (+) strand; PAM type: YTN; PAM sequence: TTT
  source 1..20: mol_type = other DNA
taatttttggtagagacggg

SEQ ID NO: 33015 - DNA, 20 bp, synthetic construct
  misc_feature 1..20: note = Description of Artificial Sequence: Synthetic oligonucleotide
  misc_feature 1..20: note = Target: FXN; (+) strand; PAM type: YTN; PAM sequence: TTT
  source 1..20: mol_type = other DNA
aatttttggtagagacgggg

SEQ ID NO: 33016 - DNA, 20 bp, synthetic construct
  misc_feature 1..20: note = Description of Artificial Sequence: Synthetic oligonucleotide
  misc_feature 1..20: note = Target: FXN; (+) strand; PAM type: YTN; PAM sequence: TTA
  source 1..20: mol_type = other DNA
atttttggtagagacggggt

SEQ ID NO: 33017 - DNA, 20 bp, synthetic construct
  misc_feature 1..20: note = Description of Artificial Sequence: Synthetic oligonucleotide
  misc_feature 1..20: note = Target: FXN; (+) strand; PAM type: YTN; PAM sequence: TTT
  source 1..20: mol_type = other DNA
ttggtagagacggggtctct

SEQ ID NO: 33018 - DNA, 20 bp, synthetic construct
  misc_feature 1..20: note = Description of Artificial Sequence: Synthetic oligonucleotide
  misc_feature 1..20: note = Target: FXN; (+) strand; PAM type: YTN; PAM sequence: TTT
  source 1..20: mol_type = other DNA
tggtagagacggggtctctg

SEQ ID NO: 33019 - DNA, 20 bp, synthetic construct
  misc_feature 1..20: note = Description of Artificial Sequence: Synthetic oligonucleotide
  misc_feature 1..20: note = Target: FXN; (+) strand; PAM type: YTN; PAM sequence: TTT
  source 1..20: mol_type = other DNA
ggtagagacggggtctctgt

SEQ ID NO: 33020 - DNA, 20 bp, synthetic construct
  misc_feature 1..20: note = Description of Artificial Sequence: Synthetic oligonucleotide
  misc_feature 1..20: note = Target: FXN; (+) strand; PAM type: YTN; PAM sequence: TTG
  source 1..20: mol_type = other DNA
gtagagacggggtctctgtt

SEQ ID NO: 33021 - DNA, 20 bp, synthetic construct
  misc_feature 1..20: note = Description of Artificial Sequence: Synthetic oligonucleotide
  misc_feature 1..20: note = Target: FXN; (+) strand; PAM type: YTN; PAM sequence: CTC
  source 1..20: mol_type = other DNA
tgttgtctcagattcctggg

SEQ ID NO: 33022 - DNA, 20 bp, synthetic construct
  misc_feature 1..20: note = Description of Artificial Sequence: Synthetic oligonucleotide
  misc_feature 1..20: note = Target: FXN; (+) strand; PAM type: YTN; PAM sequence: CTG
  source 1..20: mol_type = other DNA
ttgtctcagattcctgggtt

SEQ ID NO: 33023 - DNA, 20 bp, synthetic construct
  misc_feature 1..20: note = Description of Artificial Sequence: Synthetic oligonucleotide
  misc_feature 1..20: note = Target: FXN; (+) strand; PAM type: YTN; PAM sequence: TTG
  source 1..20: mol_type = other DNA
tctcagattcctgggttcaa

SEQ ID NO: 33024 - DNA, 20 bp, synthetic construct
  misc_feature 1..20: note = Description of Artificial Sequence: Synthetic oligonucleotide
  misc_feature 1..20: note = Target: FXN; (+) strand; PAM type: YTN; PAM sequence: CTC
  source 1..20: mol_type = other DNA
agattcctgggttcaagtga

SEQ ID NO: 33025 - DNA, 20 bp, synthetic construct
  misc_feature 1..20: note = Description of Artificial Sequence: Synthetic oligonucleotide
  misc_feature 1..20: note = Target: FXN; (+) strand; PAM type: YTN; PAM sequence: TTC
  source 1..20: mol_type = other DNA
ctgggttcaagtgatccttc

SEQ ID NO: 33026 - DNA, 20 bp, synthetic construct
  misc_feature 1..20: note = Description of Artificial Sequence: Synthetic oligonucleotide
  misc_feature 1..20: note = Target: FXN; (+) strand; PAM type: YTN; PAM sequence: CTG
  source 1..20: mol_type = other DNA
ggttcaagtgatccttctcc

SEQ ID NO: 33027 - DNA, 20 bp, synthetic construct
  misc_feature 1..20: note = Description of Artificial Sequence: Synthetic oligonucleotide
  misc_feature 1..20: note = Target: FXN; (+) strand; PAM type: YTN; PAM sequence: TTC
  source 1..20: mol_type = other DNA
aagtgatccttctcccttgg

SEQ ID NO: 33028 - DNA, 20 bp, synthetic construct
  misc_feature 1..20: note = Description of Artificial Sequence: Synthetic oligonucleotide
  misc_feature 1..20: note = Target: FXN; (+) strand; PAM type: YTN; PAM sequence: CTT
  source 1..20: mol_type = other DNA
ctcccttggcctcccaaagt

SEQ ID NO: 33029 - DNA, 20 bp, synthetic construct
  misc_feature 1..20: note = Description of Artificial Sequence: Synthetic oligonucleotide
  misc_feature 1..20: note = Target: FXN; (+) strand; PAM type: YTN; PAM sequence: TTC
  source 1..20: mol_type = other DNA
tcccttggcctcccaaagtt

SEQ ID NO: 33030 - DNA, 20 bp, synthetic construct
  misc_feature 1..20: note = Description of Artificial Sequence: Synthetic oligonucleotide
  misc_feature 1..20: note = Target: FXN; (+) strand; PAM type: YTN; PAM sequence: CTC
  source 1..20: mol_type = other DNA
ccttggcctcccaaagttct

SEQ ID NO: 33031 - DNA, 20 bp, synthetic construct
  misc_feature 1..20: note = Description of Artificial Sequence: Synthetic oligonucleotide
  misc_feature 1..20: note = Target: FXN; (+) strand; PAM type: YTN; PAM sequence: CTT
  source 1..20: mol_type = other DNA
ggcctcccaaagttctggta

SEQ ID NO: 33032 - DNA, 20 bp, synthetic construct
  misc_feature 1..20: note = Description of Artificial Sequence: Synthetic oligonucleotide
  misc_feature 1..20: note = Target: FXN; (+) strand; PAM type: YTN; PAM sequence: TTG
  source 1..20: mol_type = other DNA
gcctcccaaagttctggtat

SEQ ID NO: 33033 - DNA, 20 bp, synthetic construct
  misc_feature 1..20: note = Description of Artificial Sequence: Synthetic oligonucleotide
  misc_feature 1..20: note = Target: FXN; (+) strand; PAM type: YTN; PAM sequence: CTC
  source 1..20: mol_type = other DNA
ccaaagttctggtattacag

SEQ ID NO: 33034 - DNA, 20 bp, synthetic construct
  misc_feature 1..20: note = Description of Artificial Sequence: Synthetic oligonucleotide
  misc_feature 1..20: note = Target: FXN; (+) strand; PAM type: YTN; PAM sequence: TTC
  source 1..20: mol_type = other DNA
tggtattacaggcatgagcc

SEQ ID NO: 33035 - DNA, 20 bp, synthetic construct
  misc_feature 1..20: note = Description of Artificial Sequence: Synthetic oligonucleotide
  misc_feature 1..20: note = Target: FXN; (+) strand; PAM type: YTN; PAM sequence: CTG
  source 1..20: mol_type = other DNA
gtattacaggcatgagccac

SEQ ID NO: 33036 - DNA, 20 bp, synthetic construct
  misc_feature 1..20: note = Description of Artificial Sequence: Synthetic oligonucleotide
  misc_feature 1..20: note = Target: FXN; (+) strand; PAM type: YTN; PAM sequence: TTA
  source 1..20: mol_type = other DNA
caggcatgagccactgcacc

SEQ ID NO: 33037 - DNA, 20 bp, synthetic construct
  misc_feature 1..20: note = Description of Artificial Sequence: Synthetic oligonucleotide
  misc_feature 1..20: note = Target: FXN; (+) strand; PAM type: YTN; PAM sequence: CTG
  source 1..20: mol_type = other DNA
cacccagcccatggccagct

SEQ ID NO: 33038 - DNA, 20 bp, synthetic construct
  misc_feature 1..20: note = Description of Artificial Sequence: Synthetic oligonucleotide
  misc_feature 1..20: note = Target: FXN; (+) strand; PAM type: YTN; PAM sequence: CTC
  source 1..20: mol_type = other DNA
ttgatacgatctgtctcttt

SEQ ID NO: 33039 - DNA, 20 bp, synthetic construct
  misc_feature 1..20: note = Description of Artificial Sequence: Synthetic oligonucleotide
  misc_feature 1..20: note = Target: FXN; (+) strand; PAM type: YTN; PAM sequence: CTT
  source 1..20: mol_type = other DNA
gatacgatctgtctctttct

SEQ ID NO: 33040 - DNA, 20 bp, synthetic construct
  misc_feature 1..20: note = Description of Artificial Sequence: Synthetic oligonucleotide
  misc_feature 1..20: note = Target: FXN; (+) strand; PAM type: YTN; PAM sequence: TTG
  source 1..20: mol_type = other DNA
atacgatctgtctctttctt

SEQ ID NO: 33041 - DNA, 20 bp, synthetic construct
  misc_feature 1..20: note = Description of Artificial Sequence: Synthetic oligonucleotide
  misc_feature 1..20: note = Target: FXN; (+) strand; PAM type: YTN; PAM sequence: CTG
  source 1..20: mol_type = other DNA
tctctttcttttcttttttt

SEQ ID NO: 33042 - DNA, 20 bp, synthetic construct
  misc_feature 1..20: note = Description of Artificial Sequence: Synthetic oligonucleotide
  misc_feature 1..20: note = Target: FXN; (+) strand; PAM type: YTN; PAM sequence: CTC
  source 1..20: mol_type = other DNA
tttcttttcttttttttttt

SEQ ID NO: 33043 - DNA, 20 bp, synthetic construct
  misc_feature 1..20: note = Description of Artificial Sequence: Synthetic oligonucleotide
  misc_feature 1..20: note = Target: FXN; (+) strand; PAM type: YTN; PAM sequence: CTT
  source 1..20: mol_type = other DNA
tcttttcttttttttttttt

SEQ ID NO: 33044 - DNA, 20 bp, synthetic construct
  misc_feature 1..20: note = Description of Artificial Sequence: Synthetic oligonucleotide
  misc_feature 1..20: note = Target: FXN; (+) strand; PAM type: YTN; PAM sequence: TTT
  source 1..20: mol_type = other DNA
cttttcttttttttttttta

SEQ ID NO: 33045 - DNA, 20 bp, synthetic construct
  misc_feature 1..20: note = Description of Artificial Sequence: Synthetic oligonucleotide
  misc_feature 1..20: note = Target: FXN; (+) strand; PAM type: YTN; PAM sequence: TTC
  source 1..20: mol_type = other DNA
ttttctttttttttttttaa

SEQ ID NO: 33046 - DNA, 20 bp, synthetic construct
  misc_feature 1..20: note = Description of Artificial Sequence: Synthetic oligonucleotide
  misc_feature 1..20: note = Target: FXN; (+) strand; PAM type: YTN; PAM sequence: CTT
  source 1..20: mol_type = other DNA
ttctttttttttttttaatt

SEQ ID NO: 33047 - DNA, 20 bp, synthetic construct
  misc_feature 1..20: note = Description of Artificial Sequence: Synthetic oligonucleotide
  misc_feature 1..20: note = Target: FXN; (+) strand; PAM type: YTN; PAM sequence: TTT
  source 1..20: mol_type = other DNA
tctttttttttttttaattt

SEQ ID NO: 33048 - DNA, 20 bp, synthetic construct
  misc_feature 1..20: note = Description of Artificial Sequence: Synthetic oligonucleotide
  misc_feature 1..20: note = Target: FXN; (+) strand; PAM type: YTN; PAM sequence: TTT
  source 1..20: mol_type = other DNA
ctttttttttttttaatttg

SEQ ID NO: 33049 - DNA, 20 bp, synthetic construct
  misc_feature 1..20: note = Description of Artificial Sequence: Synthetic oligonucleotide
  misc_feature 1..20: note = Target: FXN; (+) strand; PAM type: YTN; PAM sequence: TTC
  source 1..20: mol_type = other DNA
tttttttttttttaatttga

SEQ ID NO: 33050 - DNA, 20 bp, synthetic construct
  misc_feature 1..20: note = Description of Artificial Sequence: Synthetic oligonucleotide
  misc_feature 1..20: note = Target: FXN; (+) strand; PAM type: YTN; PAM sequence: CTT
  source 1..20: mol_type = other DNA
tttttttttttaatttgaga

SEQ ID NO: 33051 - DNA, 20 bp, synthetic construct
  misc_feature 1..20: note = Description of Artificial Sequence: Synthetic oligonucleotide
  misc_feature 1..20: note = Target: FXN; (+) strand; PAM type: YTN; PAM sequence: TTT
  source 1..20: mol_type = other DNA
ttttttttttaatttgagaa

SEQ ID NO: 33052 - DNA, 20 bp, synthetic construct
  misc_feature 1..20: note = Description of Artificial Sequence: Synthetic oligonucleotide
  misc_feature 1..20: note = Target: FXN; (+) strand; PAM type: YTN; PAM sequence: TTT
  source 1..20: mol_type = other DNA
tttttttttaatttgagaag

SEQ ID NO: 33053 - DNA, 20 bp, synthetic construct
  misc_feature 1..20: note = Description of Artificial Sequence: Synthetic oligonucleotide
  misc_feature 1..20: note = Target: FXN; (+) strand; PAM type: YTN; PAM sequence: TTT
  source 1..20: mol_type = other DNA
ttttttttaatttgagaagt

SEQ ID NO: 33054 - DNA, 20 bp, synthetic construct
  misc_feature 1..20: note = Description of Artificial Sequence: Synthetic oligonucleotide
  misc_feature 1..20: note = Target: FXN; (+) strand; PAM type: YTN; PAM sequence: TTT
  source 1..20: mol_type = other DNA
tttttttaatttgagaagtg

SEQ ID NO: 33055 - DNA, 20 bp, synthetic construct
  misc_feature 1..20: note = Description of Artificial Sequence: Synthetic oligonucleotide
  misc_feature 1..20: note = Target: FXN; (+) strand; PAM type: YTN; PAM sequence: TTT
  source 1..20: mol_type = other DNA
ttttttaatttgagaagtgt

SEQ ID NO: 33056 - DNA, 20 bp, synthetic construct
  misc_feature 1..20: note = Description of Artificial Sequence: Synthetic oligonucleotide
  misc_feature 1..20: note = Target: FXN; (+) strand; PAM type: YTN; PAM sequence: TTT
  source 1..20: mol_type = other DNA
tttttaatttgagaagtgtt

SEQ ID NO: 33057 - DNA, 20 bp, synthetic construct
  misc_feature 1..20: note = Description of Artificial Sequence: Synthetic oligonucleotide
  misc_feature 1..20: note = Target: FXN; (+) strand; PAM type: YTN; PAM sequence: TTT
  source 1..20: mol_type = other DNA
ttttaatttgagaagtgtta

SEQ ID NO: 33058 - DNA, 20 bp, synthetic construct
  misc_feature 1..20: note = Description of Artificial Sequence: Synthetic oligonucleotide
  misc_feature 1..20: note = Target: FXN; (+) strand; PAM type: YTN; PAM sequence: TTT
  source 1..20: mol_type = other DNA
tttaatttgagaagtgttaa

SEQ ID NO: 33059 - DNA, 20 bp, synthetic construct
  misc_feature 1..20: note = Description of Artificial Sequence: Synthetic oligonucleotide
  misc_feature 1..20: note = Target: FXN; (+) strand; PAM type: YTN; PAM sequence: TTT
  source 1..20: mol_type = other DNA
ttaatttgagaagtgttaaa

SEQ ID NO: 33060 - DNA, 20 bp, synthetic construct
  misc_feature 1..20: note = Description of Artificial Sequence: Synthetic oligonucleotide
  misc_feature 1..20: note = Target: FXN; (+) strand; PAM type: YTN; PAM sequence: TTT
  source 1..20: mol_type = other DNA
taatttgagaagtgttaaat

SEQ ID NO: 33061 - DNA, 20 bp, synthetic construct
  misc_feature 1..20: note = Description of Artificial Sequence: Synthetic oligonucleotide
  misc_feature 1..20: note = Target: FXN; (+) strand; PAM type: YTN; PAM sequence: TTT
  source 1..20: mol_type = other DNA
aatttgagaagtgttaaata

SEQ ID NO: 33062 - DNA, 20 bp, synthetic construct
  misc_feature 1..20: note = Description of Artificial Sequence: Synthetic oligonucleotide
  misc_feature 1..20: note = Target: FXN; (+) strand; PAM type: YTN; PAM sequence: TTA
  source 1..20: mol_type = other DNA
atttgagaagtgttaaataa

SEQ ID NO: 33063 - DNA, 20 bp, synthetic construct
  misc_feature 1..20: note = Description of Artificial Sequence: Synthetic oligonucleotide
  misc_feature 1..20: note = Target: FXN; (+) strand; PAM type: YTN; PAM sequence: TTT
  source 1..20: mol_type = other DNA
gagaagtgttaaataatctt

SEQ ID NO: 33064 - DNA, 20 bp, synthetic construct
  misc_feature 1..20: note = Description of Artificial Sequence: Synthetic oligonucleotide
  misc_feature 1..20: note = Target: FXN; (+) strand; PAM type: YTN; PAM sequence: TTG
  source 1..20: mol_type = other DNA
agaagtgttaaataatcttt

SEQ ID NO: 33065 - DNA, 20 bp, synthetic construct
  misc_feature 1..20: note = Description of Artificial Sequence: Synthetic oligonucleotide
  misc_feature 1..20: note = Target: FXN; (+) strand; PAM type: YTN; PAM sequence: TTA
  source 1..20: mol_type = other DNA
aataatctttctttgatatt

SEQ ID NO: 33066 - DNA, 20 bp, synthetic construct
  misc_feature 1..20: note = Description of Artificial Sequence: Synthetic oligonucleotide
  misc_feature 1..20: note = Target: FXN; (+) strand; PAM type: YTN; PAM sequence: CTT
  source 1..20: mol_type = other DNA
tctttgatattatacataaa

SEQ ID NO: 33067 - DNA, 20 bp, synthetic construct
  misc_feature 1..20: note = Description of Artificial Sequence: Synthetic oligonucleotide
  misc_feature 1..20: note = Target: FXN; (+) strand; PAM type: YTN; PAM sequence: TTT
  source 1..20: mol_type = other DNA
ctttgatattatacataaac

SEQ ID NO: 33068 - DNA, 20 bp, synthetic construct
  misc_feature 1..20: note = Description of Artificial Sequence: Synthetic oligonucleotide
  misc_feature 1..20: note = Target: FXN; (+) strand; PAM type: YTN; PAM sequence: TTC
  source 1..20: mol_type = other DNA
tttgatattatacataaacc

SEQ ID NO: 33069 - DNA, 20 bp, synthetic construct
  misc_feature 1..20: note = Description of Artificial Sequence: Synthetic oligonucleotide
  misc_feature 1..20: note = Target: FXN; (+) strand; PAM type: YTN; PAM sequence: CTT
  source 1..20: mol_type = other DNA
tgatattatacataaaccac

SEQ ID NO: 33070 - DNA, 20 bp, synthetic construct
  misc_feature 1..20: note = Description of Artificial Sequence: Synthetic oligonucleotide
  misc_feature 1..20: note = Target: FXN; (+) strand; PAM type: YTN; PAM sequence: TTT
  source 1..20: mol_type = other DNA
gatattatacataaaccaca

SEQ ID NO: 33071 - DNA, 20 bp, synthetic construct
  misc_feature 1..20: note = Description of Artificial Sequence: Synthetic oligonucleotide
  misc_feature 1..20: note = Target: FXN; (+) strand; PAM type: YTN; PAM sequence: TTG
  source 1..20: mol_type = other DNA
atattatacataaaccacac

SEQ ID NO: 33072 - DNA, 20 bp, synthetic construct
  misc_feature 1..20: note = Description of Artificial Sequence: Synthetic oligonucleotide
  misc_feature 1..20: note = Target: FXN; (+) strand; PAM type: YTN; PAM sequence: TTA
  source 1..20: mol_type = other DNA
tacataaaccacaccaaaat

SEQ ID NO: 33073 - DNA, 20 bp, synthetic construct
  misc_feature 1..20: note = Description of Artificial Sequence: Synthetic oligonucleotide
  misc_feature 1..20: note = Target: FXN; (+) strand; PAM type: YTN; PAM sequence: CTT
  source 1..20: mol_type = other DNA
tcagtaagtaaaatgaacca

SEQ ID NO: 33074 - DNA, 20 bp, synthetic construct
  misc_feature 1..20: note = Description of Artificial Sequence: Synthetic oligonucleotide
  misc_feature 1..20: note = Target: FXN; (+) strand; PAM type: YTN; PAM sequence: TTT
  source 1..20: mol_type = other DNA
cagtaagtaaaatgaaccat

SEQ ID NO: 33075 - DNA, 20 bp, synthetic construct
  misc_feature 1..20: note = Description of Artificial Sequence: Synthetic oligonucleotide
  misc_feature 1..20: note = Target: FXN; (+) strand; PAM type: YTN; PAM sequence: TTC
  source 1..20: mol_type = other DNA
agtaagtaaaatgaaccatt

SEQ ID NO: 33076 - DNA, 20 bp, synthetic construct
  misc_feature 1..20: note = Description of Artificial Sequence: Synthetic oligonucleotide
  misc_feature 1..20: note = Target: FXN; (+) strand; PAM type: YTN; PAM sequence: TTT
  source 1..20: mol_type = other DNA
tagatacagaaaattctaat

SEQ ID NO: 33077 - DNA, 20 bp, synthetic construct
  misc_feature 1..20: note = Description of Artificial Sequence: Synthetic oligonucleotide
  misc_feature 1..20: note = Target: FXN; (+) strand; PAM type: YTN; PAM sequence: TTT
  source 1..20: mol_type = other DNA
agatacagaaaattctaatt

SEQ ID NO: 33078 - DNA, 20 bp, synthetic construct
  misc_feature 1..20: note = Description of Artificial Sequence: Synthetic oligonucleotide
  misc_feature 1..20: note = Target: FXN; (+) strand; PAM type: YTN; PAM sequence: TTA
  source 1..20: mol_type = other DNA
gatacagaaaattctaatta

SEQ ID NO: 33079 - DNA, 20 bp, synthetic construct
  misc_feature 1..20: note = Description of Artificial Sequence: Synthetic oligonucleotide
  misc_feature 1..20: note = Target: FXN; (+) strand; PAM type: YTN; PAM sequence: TTC
  source 1..20: mol_type = other DNA
taattagattggcatagtta

SEQ ID NO: 33080 - DNA, 20 bp, synthetic construct
  misc_feature 1..20: note = Description of Artificial Sequence: Synthetic oligonucleotide
  misc_feature 1..20: note = Target: FXN; (+) strand; PAM type: YTN; PAM sequence: CTA
  source 1..20: mol_type = other DNA
attagattggcatagttaag

SEQ ID NO: 33081 - DNA, 20 bp, synthetic construct
  misc_feature 1..20: note = Description of Artificial Sequence: Synthetic oligonucleotide
  misc_feature 1..20: note = Target: FXN; (+) strand; PAM type: YTN; PAM sequence: TTA
  source 1..20: mol_type = other DNA
gattggcatagttaaggcca

SEQ ID NO: 33082 - DNA, 20 bp, synthetic construct
  misc_feature 1..20: note = Description of Artificial Sequence: Synthetic oligonucleotide
  misc_feature 1..20: note = Target: FXN; (+) strand; PAM type: YTN; PAM sequence: TTG
  source 1..20: mol_type = other DNA
gcatagttaaggccaaaaat

SEQ ID NO: 33083 - DNA, 20 bp, synthetic construct
  misc_feature 1..20: note = Description of Artificial Sequence: Synthetic oligonucleotide
  misc_feature 1..20: note = Target: FXN; (+) strand; PAM type: YTN; PAM sequence: TTA
  source 1..20: mol_type = other DNA
aggccaaaaatataaagttg

SEQ ID NO: 33084 - DNA, 20 bp, synthetic construct
  misc_feature 1..20: note = Description of Artificial Sequence: Synthetic oligonucleotide
  misc_feature 1..20: note = Target: FXN; (+) strand; PAM type: YTN; PAM sequence: TTG
  source 1..20: mol_type = other DNA
acattgctaccttatcttca

SEQ ID NO: 33085 - DNA, 20 bp, synthetic construct
  misc_feature 1..20: note = Description of Artificial Sequence: Synthetic oligonucleotide
  misc_feature 1..20: note = Target: FXN; (+) strand; PAM type: YTN; PAM sequence: TTG
  source 1..20: mol_type = other DNA
ctaccttatcttcagccctt

SEQ ID NO: 33086 - DNA, 20 bp, synthetic construct
  misc_feature 1..20: note = Description of Artificial Sequence: Synthetic oligonucleotide
  misc_feature 1..20: note = Target: FXN; (+) strand; PAM type: YTN; PAM sequence: CTA
  source 1..20: mol_type = other DNA
ccttatcttcagcccttgcc

SEQ ID NO: 33087 - DNA, 20 bp, synthetic construct
  misc_feature 1..20: note = Description of Artificial Sequence: Synthetic oligonucleotide
  misc_feature 1..20: note = Target: FXN; (+) strand; PAM type: YTN; PAM sequence: CTT
  source 1..20: mol_type = other DNA
atcttcagcccttgccttta

SEQ ID NO: 33088 - DNA, 20 bp, synthetic construct
  misc_feature 1..20: note = Description of Artificial Sequence: Synthetic oligonucleotide
  misc_feature 1..20: note = Target: FXN; (+) strand; PAM type: YTN; PAM sequence: TTA
  source 1..20: mol_type = other DNA
tcttcagcccttgcctttaa

SEQ ID NO: 33089 - DNA, 20 bp, synthetic construct
  misc_feature 1..20: note = Description of Artificial Sequence: Synthetic oligonucleotide
  misc_feature 1..20: note = Target: FXN; (+) strand; PAM type: YTN; PAM sequence: CTT
  source 1..20: mol_type = other DNA
cagcccttgcctttaagagg

SEQ ID NO: 33090 - DNA, 20 bp, synthetic construct
  misc_feature 1..20: note = Description of Artificial Sequence: Synthetic oligonucleotide
  misc_feature 1..20: note = Target: FXN; (+) strand; PAM type: YTN; PAM sequence: TTC
  source 1..20: mol_type = other DNA
agcccttgcctttaagaggc

SEQ ID NO: 33091 - DNA, 20 bp, synthetic construct
  misc_feature 1..20: note = Description of Artificial Sequence: Synthetic oligonucleotide
  misc_feature 1..20: note = Target: FXN; (+) strand; PAM type: YTN; PAM sequence: CTT
  source 1..20: mol_type = other DNA
gcctttaagaggcaaatgaa

SEQ ID NO: 33092 - DNA, 20 bp, synthetic construct
  misc_feature 1..20: note = Description of Artificial Sequence: Synthetic oligonucleotide
  misc_feature 1..20: note = Target: FXN; (+) strand; PAM type: YTN; PAM sequence: TTG
  source 1..20: mol_type = other DNA
cctttaagaggcaaatgaac

SEQ ID NO: 33093 - DNA, 20 bp, synthetic construct
  misc_feature 1..20: note = Description of Artificial Sequence: Synthetic oligonucleotide
  misc_feature 1..20: note = Target: FXN; (+) strand; PAM type: YTN; PAM sequence: CTT
  source 1..20: mol_type = other DNA
taagaggcaaatgaacacaa

SEQ ID NO: 33094 - DNA, 20 bp, synthetic construct
  misc_feature 1..20: note = Description of Artificial Sequence: Synthetic oligonucleotide
  misc_feature 1..20: note = Target: FXN; (+) strand; PAM type: YTN; PAM sequence: TTT
  source 1..20: mol_type = other DNA
aagaggcaaatgaacacaaa

SEQ ID NO: 33095 - DNA, 20 bp, synthetic construct
  misc_feature 1..20: note = Description of Artificial Sequence: Synthetic oligonucleotide
  misc_feature 1..20: note = Target: FXN; (+) strand; PAM type: YTN; PAM sequence: TTA
  source 1..20: mol_type = other DNA
agaggcaaatgaacacaaaa

SEQ ID NO: 33096 - DNA, 20 bp, synthetic construct
  misc_feature 1..20: note = Description of Artificial Sequence: Synthetic oligonucleotide
  misc_feature 1..20: note = Target: FXN; (+) strand; PAM type: YTN; PAM sequence: CTT
  source 1..20: mol_type = other DNA
gcttggttctgagacagtga

SEQ ID NO: 33097 - DNA, 20 bp, synthetic construct
  misc_feature 1..20: note = Description of Artificial Sequence: Synthetic oligonucleotide
  misc_feature 1..20: note = Target: FXN; (+) strand; PAM type: YTN; PAM sequence: TTG
  source 1..20: mol_type = other DNA
cttggttctgagacagtgaa

SEQ ID NO: 33098 - DNA, 20 bp, synthetic construct
  misc_feature 1..20: note = Description of Artificial Sequence: Synthetic oligonucleotide
  misc_feature 1..20: note = Target: FXN; (+) strand; PAM type: YTN; PAM sequence: CTT
  source 1..20: mol_type = other DNA
ggttctgagacagtgaagga

SEQ ID NO: 33099 - DNA, 20 bp, synthetic construct
  misc_feature 1..20: note = Description of Artificial Sequence: Synthetic oligonucleotide
  misc_feature 1..20: note = Target: FXN; (+) strand; PAM type: YTN; PAM sequence: TTG
  source 1..20: mol_type = other DNA
gttctgagacagtgaaggac

SEQ ID NO: 33100 - DNA, 20 bp, synthetic construct
  misc_feature 1..20: note = Description of Artificial Sequence: Synthetic oligonucleotide
  misc_feature 1..20: note = Target: FXN; (+) strand; PAM type: YTN; PAM sequence: TTC
  source 1..20: mol_type = other DNA
tgagacagtgaaggactttc

SEQ ID NO: 33101 - DNA, 20 bp, synthetic construct
  misc_feature 1..20: note = Description of Artificial Sequence: Synthetic oligonucleotide
  misc_feature 1..20: note = Target: FXN; (+) strand; PAM type: YTN; PAM sequence: CTG
  source 1..20: mol_type = other DNA
agacagtgaaggactttccc

SEQ ID NO: 33102 - DNA, 20 bp, synthetic construct
  misc_feature 1..20: note = Description of Artificial Sequence: Synthetic oligonucleotide
  misc_feature 1..20: note = Target: FXN; (+) strand; PAM type: YTN; PAM sequence: CTT
  source 1..20: mol_type = other DNA
tcccccagtatttaaatata

SEQ ID NO: 33103 - DNA, 20 bp, synthetic construct
  misc_feature 1..20: note = Description of Artificial Sequence: Synthetic oligonucleotide
  misc_feature 1..20: note = Target: FXN; (+) strand; PAM type: YTN; PAM sequence: TTT
  source 1..20: mol_type = other DNA
cccccagtatttaaatatat

SEQ ID NO: 33104 - DNA, 20 bp, synthetic construct
  misc_feature 1..20: note = Description of Artificial Sequence: Synthetic oligonucleotide
  misc_feature 1..20: note = Target: FXN; (+) strand; PAM type: YTN; PAM sequence: TTC
  source 1..20: mol_type = other DNA
ccccagtatttaaatatatt

SEQ ID NO: 33105 - DNA, 20 bp, synthetic construct
  misc_feature 1..20: note = Description of Artificial Sequence: Synthetic oligonucleotide
  misc_feature 1..20: note = Target: FXN; (+) strand; PAM type: YTN; PAM sequence: TTT
  source 1..20: mol_type = other DNA
aaatatatttacataaccag

SEQ ID NO: 33106 - DNA, 20 bp, synthetic construct
  misc_feature 1..20: note = Description of Artificial Sequence: Synthetic oligonucleotide
  misc_feature 1..20: note = Target: FXN; (+) strand; PAM type: YTN; PAM sequence: TTA
  source 1..20: mol_type = other DNA
aatatatttacataaccagt

SEQ ID NO: 33107 - DNA, 20 bp, synthetic construct
  misc_feature 1..20: note = Description of Artificial Sequence: Synthetic oligonucleotide
  misc_feature 1..20: note = Target: FXN; (+) strand; PAM type: YTN; PAM sequence: TTT
  source 1..20: mol_type = other DNA
acataaccagttacataaat

SEQ ID NO: 33108 - DNA, 20 bp, synthetic construct
  misc_feature 1..20: note = Description of Artificial Sequence: Synthetic oligonucleotide
  misc_feature 1..20: note = Target: FXN; (+) strand; PAM type: YTN; PAM sequence: TTA
  source 1..20: mol_type = other DNA
cataaccagttacataaatc

SEQ ID NO: 33109 - DNA, 20 bp, synthetic construct
  misc_feature 1..20: note = Description of Artificial Sequence: Synthetic oligonucleotide
  misc_feature 1..20: note = Target: FXN; (+) strand; PAM type: YTN; PAM sequence: TTA
  source 1..20: mol_type = other DNA
cataaatctaaatattaaaa

SEQ ID NO: 33110 - DNA, 20 bp, synthetic construct
  misc_feature 1..20: note = Description of Artificial Sequence: Synthetic oligonucleotide
  misc_feature 1..20: note = Target: FXN; (+) strand; PAM type: YTN; PAM sequence: CTA
  source 1..20: mol_type = other DNA
aatattaaaaaaatctccaa

SEQ ID NO: 33111 - DNA, 20 bp, synthetic construct
  misc_feature 1..20: note = Description of Artificial Sequence: Synthetic oligonucleotide
  misc_feature 1..20: note = Target: FXN; (+) strand; PAM type: YTN; PAM sequence: TTA
  source 1..20: mol_type = other DNA
aaaaaatctccaatagattt

SEQ ID NO: 33112 - DNA, 20 bp, synthetic construct
  misc_feature 1..20: note = Description of Artificial Sequence: Synthetic oligonucleotide
  misc_feature 1..20: note = Target: FXN; (+) strand; PAM type: YTN; PAM sequence: CTC
  source 1..20: mol_type = other DNA
caatagattttagatggcat

SEQ ID NO: 33113 - DNA, 20 bp, synthetic construct
  misc_feature 1..20: note = Description of Artificial Sequence: Synthetic oligonucleotide
  misc_feature 1..20: note = Target: FXN; (+) strand; PAM type: YTN; PAM sequence: TTT
  source 1..20: mol_type = other DNA
tagatggcattcaccatctt

SEQ ID NO: 33114 - DNA, 20 bp, synthetic construct
  misc_feature 1..20: note = Description of Artificial Sequence: Synthetic oligonucleotide
  misc_feature 1..20: note = Target: FXN; (+) strand; PAM type: YTN; PAM sequence: TTT
  source 1..20: mol_type = other DNA
agatggcattcaccatcttt

SEQ ID NO: 33115 - DNA, 20 bp, synthetic construct
  misc_feature 1..20: note = Description of Artificial Sequence: Synthetic oligonucleotide
  misc_feature 1..20: note = Target: FXN; (+) strand; PAM type: YTN; PAM sequence: TTA
  source 1..20: mol_type = other DNA
gatggcattcaccatctttg

SEQ ID NO: 33116 - DNA, 20 bp, synthetic construct
  misc_feature 1..20: note = Description of Artificial Sequence: Synthetic oligonucleotide
  misc_feature 1..20: note = Target: FXN; (+) strand; PAM type: YTN; PAM sequence: TTC
  source 1..20: mol_type = other DNA
accatctttgtgaaaagttg

SEQ ID NO: 33117 - DNA, 20 bp, synthetic construct
  misc_feature 1..20: note = Description of Artificial Sequence: Synthetic oligonucleotide
  misc_feature 1..20: note = Target: FXN; (+) strand; PAM type: YTN; PAM sequence: CTT
  source 1..20: mol_type = other DNA
tgtgaaaagttgaacattac

SEQ ID NO: 33118 - DNA, 20 bp, synthetic construct
  misc_feature 1..20: note = Description of Artificial Sequence: Synthetic oligonucleotide
  misc_feature 1..20: note = Target: FXN; (+) strand; PAM type: YTN; PAM sequence: TTT
  source 1..20: mol_type = other DNA
gtgaaaagttgaacattact

SEQ ID NO: 33119 - DNA, 20 bp, synthetic construct
  misc_feature 1..20: note = Description of Artificial Sequence: Synthetic oligonucleotide
  misc_feature 1..20: note = Target: FXN; (+) strand; PAM type: YTN; PAM sequence: TTG
  source 1..20: mol_type = other DNA
tgaaaagttgaacattacta

SEQ ID NO: 33120 - DNA, 20 bp, synthetic construct
  misc_feature 1..20: note = Description of Artificial Sequence: Synthetic oligonucleotide
  misc_feature 1..20: note = Target: FXN; (+) strand; PAM type: YTN; PAM sequence: TTG
  source 1..20: mol_type = other DNA
aacattactaatgaaatctg

SEQ ID NO: 33121 - DNA, 20 bp, synthetic construct
  misc_feature 1..20: note = Description of Artificial Sequence: Synthetic oligonucleotide
  misc_feature 1..20: note = Target: FXN; (+) strand; PAM type: YTN; PAM sequence: TTA
  source 1..20: mol_type = other DNA
ctaatgaaatctgatcatat

SEQ ID NO: 33122 - DNA, 20 bp, synthetic construct
  misc_feature 1..20: note = Description of Artificial Sequence: Synthetic oligonucleotide
  misc_feature 1..20: note = Target: FXN; (+) strand; PAM type: YTN; PAM sequence: CTA
  source 1..20: mol_type = other DNA
atgaaatctgatcatatctt

SEQ ID NO: 33123 - DNA, 20 bp, synthetic construct
  misc_feature 1..20: note = Description of Artificial Sequence: Synthetic oligonucleotide
  misc_feature 1..20: note = Target: FXN; (+) strand; PAM type: YTN; PAM sequence: CTG
  source 1..20: mol_type = other DNA
atcatatctttagaaggata

SEQ ID NO: 33124 - DNA, 20 bp, synthetic construct
  misc_feature 1..20: note = Description of Artificial Sequence: Synthetic oligonucleotide
  misc_feature 1..20: note = Target: FXN; (+) strand; PAM type: YTN; PAM sequence: CTT
  source 1..20: mol_type = other DNA
tagaaggataaacagtgata

SEQ ID NO: 33125 - DNA, 20 bp, synthetic construct
  misc_feature 1..20: note = Description of Artificial Sequence: Synthetic oligonucleotide
  misc_feature 1..20: note = Target: FXN; (+) strand; PAM type: YTN; PAM sequence: TTT
  source 1..20: mol_type = other DNA
agaaggataaacagtgatag

SEQ ID NO: 33126 - DNA, 20 bp, synthetic construct
  misc_feature 1..20: note = Description of Artificial Sequence: Synthetic oligonucleotide
  misc_feature 1..20: note = Target: FXN; (+) strand; PAM type: YTN; PAM sequence: TTA
  source 1..20: mol_type = other DNA
gaaggataaacagtgatagc

SEQ ID NO: 33127 - DNA, 20 bp, synthetic construct
  misc_feature 1..20: note = Description of Artificial Sequence: Synthetic oligonucleotide
  misc_feature 1..20: note = Target: FXN; (+) strand; PAM type: YTN; PAM sequence: TTT
  source 1..20: mol_type = other DNA
actgaatcagaataactgtt

SEQ ID NO: 33128 - DNA, 20 bp, synthetic construct
  misc_feature 1..20: note = Description of Artificial Sequence: Synthetic oligonucleotide
  misc_feature 1..20: note = Target: FXN; (+) strand; PAM type: YTN; PAM sequence: TTA
  source 1..20: mol_type = other DNA
ctgaatcagaataactgttt

SEQ ID NO: 33129 - DNA, 20 bp, synthetic construct
  misc_feature 1..20: note = Description of Artificial Sequence: Synthetic oligonucleotide
  misc_feature 1..20: note = Target: FXN; (+) strand; PAM type: YTN; PAM sequence: CTG
  source 1..20: mol_type = other DNA
aatcagaataactgtttttt

SEQ ID NO: 33130 - DNA, 20 bp, synthetic construct
  misc_feature 1..20: note = Description of Artificial Sequence: Synthetic oligonucleotide
  misc_feature 1..20: note = Target: FXN; (+) strand; PAM type: YTN; PAM sequence: CTG
  source 1..20: mol_type = other DNA
ttttttggggttttctttga

SEQ ID NO: 33131 - DNA, 20 bp, synthetic construct
  misc_feature 1..20: note = Description of Artificial Sequence: Synthetic oligonucleotide
  misc_feature 1..20: note = Target: FXN; (+) strand; PAM type: YTN; PAM sequence: TTT
  source 1..20: mol_type = other DNA
tttggggttttctttgagac

SEQ ID NO: 33132 - DNA, 20 bp, synthetic construct
  misc_feature 1..20: note = Description of Artificial Sequence: Synthetic oligonucleotide
  misc_feature 1..20: note = Target: FXN; (+) strand; PAM type: YTN; PAM sequence: TTT
  source 1..20: mol_type = other DNA
ttggggttttctttgagacg

SEQ ID NO: 33133 - DNA, 20 bp, synthetic construct
  misc_feature 1..20: note = Description of Artificial Sequence: Synthetic oligonucleotide
  misc_feature 1..20: note = Target: FXN; (+) strand; PAM type: YTN; PAM sequence: TTT
  source 1..20: mol_type = other DNA
tggggttttctttgagacgg

SEQ ID NO: 33134 - DNA, 20 bp, synthetic construct
  misc_feature 1..20: note = Description of Artificial Sequence: Synthetic oligonucleotide
  misc_feature 1..20: note = Target: FXN; (+) strand; PAM type: YTN; PAM sequence: TTT
  source 1..20: mol_type = other DNA
ggggttttctttgagacgga

SEQ ID NO: 33135 - DNA, 20 bp, synthetic construct
  misc_feature 1..20: note = Description of Artificial Sequence: Synthetic oligonucleotide
  misc_feature 1..20: note = Target: FXN; (+) strand; PAM type: YTN; PAM sequence: TTG
  source 1..20: mol_type = other DNA
gggttttctttgagacggag

SEQ ID NO: 33136 - DNA, 20 bp, synthetic construct
  misc_feature 1..20: note = Description of Artificial Sequence: Synthetic oligonucleotide
  misc_feature 1..20: note = Target: FXN; (+) strand; PAM type: YTN; PAM sequence: TTT
  source 1..20: mol_type = other DNA
tctttgagacggagttttgc

SEQ ID NO: 33137 - DNA, 20 bp, synthetic construct
  misc_feature 1..20: note = Description of Artificial Sequence: Synthetic oligonucleotide
  misc_feature 1..20: note = Target: FXN; (+) strand; PAM type: YTN; PAM sequence: TTT
  source 1..20: mol_type = other DNA
ctttgagacggagttttgct

SEQ ID NO: 33138 - DNA, 20 bp, synthetic construct
  misc_feature 1..20: note = Description of Artificial Sequence: Synthetic oligonucleotide
  misc_feature 1..20: note = Target: FXN; (+) strand; PAM type: YTN; PAM sequence: TTC
  source 1..20: mol_type = other DNA
tttgagacggagttttgctc

SEQ ID NO: 33139 - DNA, 20 bp, synthetic construct
  misc_feature 1..20: note = Description of Artificial Sequence: Synthetic oligonucleotide
  misc_feature 1..20: note = Target: FXN; (+) strand; PAM type: YTN; PAM sequence: CTT
  source 1..20: mol_type = other DNA
tgagacggagttttgctctt

SEQ ID NO: 33140 - DNA, 20 bp, synthetic construct
  misc_feature 1..20: note = Description of Artificial Sequence: Synthetic oligonucleotide
  misc_feature 1..20: note = Target: FXN; (+) strand; PAM type: YTN; PAM sequence: TTT
  source 1..20: mol_type = other DNA
gagacggagttttgctcttg

SEQ ID NO: 33141 - DNA, 20 bp, synthetic construct
  misc_feature 1..20: note = Description of Artificial Sequence: Synthetic oligonucleotide
  misc_feature 1..20: note = Target: FXN; (+) strand; PAM type: YTN; PAM sequence: TTG
  source 1..20: mol_type = other DNA
agacggagttttgctcttgt

SEQ ID NO: 33142 - DNA, 20 bp, synthetic construct
  misc_feature 1..20: note = Description of Artificial Sequence: Synthetic oligonucleotide
  misc_feature 1..20: note = Target: FXN; (+) strand; PAM type: YTN; PAM sequence: TTT
  source 1..20: mol_type = other DNA
tgctcttgttgcccaggctg

SEQ ID NO: 33143 - DNA, 20 bp, synthetic construct
  misc_feature 1..20: note = Description of Artificial Sequence: Synthetic oligonucleotide
  misc_feature 1..20: note = Target: FXN; (+) strand; PAM type: YTN; PAM sequence: TTT
  source 1..20: mol_type = other DNA
gctcttgttgcccaggctgg

SEQ ID NO: 33144 - DNA, 20 bp, synthetic construct
  misc_feature 1..20: note = Description of Artificial Sequence: Synthetic oligonucleotide
  misc_feature 1..20: note = Target: FXN; (+) strand; PAM type: YTN; PAM sequence: TTG
  source 1..20: mol_type = other DNA
ctcttgttgcccaggctgga

SEQ ID NO: 33145 - DNA, 20 bp, synthetic construct
  misc_feature 1..20: note = Description of Artificial Sequence: Synthetic oligonucleotide
  misc_feature 1..20: note = Target: FXN; (+) strand; PAM type: YTN; PAM sequence: CTC
  source 1..20: mol_type = other DNA
ttgttgcccaggctggagtg

SEQ ID NO: 33146 - DNA, 20 bp, synthetic construct
  misc_feature 1..20: note = Description of Artificial Sequence: Synthetic oligonucleotide
  misc_feature 1..20: note = Target: FXN; (+) strand; PAM type: YTN; PAM sequence: CTT
  source 1..20: mol_type = other DNA
gttgcccaggctggagtgca

SEQ ID NO: 33147 - DNA, 20 bp, synthetic construct
  misc_feature 1..20: note = Description of Artificial Sequence: Synthetic oligonucleotide
  misc_feature 1..20: note = Target: FXN; (+) strand; PAM type: YTN; PAM sequence: TTG
  source 1..20: mol_type = other DNA
ttgcccaggctggagtgcag

SEQ ID NO: 33148 - DNA, 20 bp, synthetic construct
  misc_feature 1..20: note = Description of Artificial Sequence: Synthetic oligonucleotide
  misc_feature 1..20: note = Target: FXN; (+) strand; PAM type: YTN; PAM sequence: TTG
  source 1..20: mol_type = other DNA
cccaggctggagtgcagtgg

SEQ ID NO: 33149 - DNA, 20 bp, synthetic construct
  misc_feature 1..20: note = Description of Artificial Sequence: Synthetic oligonucleotide
  misc_feature 1..20: note = Target: FXN; (+) strand; PAM type: YTN; PAM sequence: CTG
  source 1..20: mol_type = other DNA
gagtgcagtggtgccacctc

SEQ ID NO: 33150 - DNA, 20 bp, synthetic construct
  misc_feature 1..20: note = Description of Artificial Sequence: Synthetic oligonucleotide
  misc_feature 1..20: note = Target: FXN; (+) strand; PAM type: YTN; PAM sequence: CTC
  source 1..20: mol_type = other DNA
agctcactgcaacctccgcc

SEQ ID NO: 33151 - DNA, 20 bp, synthetic construct
  misc_feature 1..20: note = Description of Artificial Sequence: Synthetic oligonucleotide
  misc_feature 1..20: note = Target: FXN; (+) strand; PAM type: YTN; PAM sequence: CTC
  source 1..20: mol_type = other DNA
actgcaacctccgccccctg

SEQ ID NO: 33152 - DNA, 20 bp, synthetic construct
  misc_feature 1..20: note = Description of Artificial Sequence: Synthetic oligonucleotide
  misc_feature 1..20: note = Target: FXN; (+) strand; PAM type: YTN; PAM sequence: CTG
  source 1..20: mol_type = other DNA
caacctccgccccctggatt

SEQ ID NO: 33153 - DNA, 20 bp, synthetic construct
  misc_feature 1..20: note = Description of Artificial Sequence: Synthetic oligonucleotide
  misc_feature 1..20: note = Target: FXN; (+) strand; PAM type: YTN; PAM sequence: CTC
  source 1..20: mol_type = other DNA
cgccccctggattcaagaga

SEQ ID NO: 33154 - DNA, 20 bp, synthetic construct
  misc_feature 1..20: note = Description of Artificial Sequence: Synthetic oligonucleotide
  misc_feature 1..20: note = Target: FXN; (+) strand; PAM type: YTN; PAM sequence: CTG
  source 1..20: mol_type = other DNA
gattcaagagattatcctgc

SEQ ID NO: 33155 - DNA, 20 bp, synthetic construct
  misc_feature 1..20: note = Description of Artificial Sequence: Synthetic oligonucleotide
  misc_feature 1..20: note = Target: FXN; (+) strand; PAM type: YTN; PAM sequence: TTC
  source 1..20: mol_type = other DNA
aagagattatcctgcctcag

SEQ ID NO: 33156 - DNA, 20 bp, synthetic construct
  misc_feature 1..20: note = Description of Artificial Sequence: Synthetic oligonucleotide
  misc_feature 1..20: note = Target: FXN; (+) strand; PAM type: YTN; PAM sequence: TTA
  source 1..20: mol_type = other DNA
tcctgcctcagcctcccgag

SEQ ID NO: 33157 - DNA, 20 bp, synthetic construct
  misc_feature 1..20: note = Description of Artificial Sequence: Synthetic oligonucleotide
  misc_feature 1..20: note = Target: FXN; (+) strand; PAM type: YTN; PAM sequence: CTG
  source 1..20: mol_type = other DNA
cctcagcctcccgagtagct

SEQ ID NO: 33158 - DNA, 20 bp, synthetic construct
  misc_feature 1..20: note = Description of Artificial Sequence: Synthetic oligonucleotide
  misc_feature 1..20: note = Target: FXN; (+) strand; PAM type: YTN; PAM sequence: CTC
  source 1..20: mol_type = other DNA
agcctcccgagtagctggga

SEQ ID NO: 33159 - DNA, 20 bp, synthetic construct
  misc_feature 1..20: note = Description of Artificial Sequence: Synthetic oligonucleotide
  misc_feature 1..20: note = Target: FXN; (+) strand; PAM type: YTN; PAM sequence: CTC
  source 1..20: mol_type = other DNA
ccgagtagctgggattacag

SEQ ID NO: 33160 - DNA, 20 bp, synthetic construct
  misc_feature 1..20: note = Description of Artificial Sequence: Synthetic oligonucleotide
  misc_feature 1..20: note = Target: FXN; (+) strand; PAM type: YTN; PAM sequence: CTG
  source 1..20: mol_type = other DNA
ggattacaggctcgccccac

SEQ ID NO: 33161 - DNA, 20 bp, synthetic construct
  misc_feature 1..20: note = Description of Artificial Sequence: Synthetic oligonucleotide
  misc_feature 1..20: note = Target: FXN; (+) strand; PAM type: YTN; PAM sequence: TTA
  source 1..20: mol_type = other DNA
caggctcgccccaccatgcc

SEQ ID NO: 33162 - DNA, 20 bp, synthetic construct
  misc_feature 1..20: note = Description of Artificial Sequence: Synthetic oligonucleotide
  misc_feature 1..20: note = Target: FXN; (+) strand; PAM type: YTN; PAM sequence: CTC
  source 1..20: mol_type = other DNA
gccccaccatgcccagctaa

SEQ ID NO: 33163 - DNA, 20 bp, synthetic construct
  misc_feature 1..20: note = Description of Artificial Sequence: Synthetic oligonucleotide
  misc_feature 1..20: note = Target: FXN; (+) strand; PAM type: YTN; PAM sequence: CTA
  source 1..20: mol_type = other DNA
atttttgtatttttagtaga

SEQ ID NO: 33164 - DNA, 20 bp, synthetic construct
  misc_feature 1..20: note = Description of Artificial Sequence: Synthetic oligonucleotide
  misc_feature 1..20: note = Target: FXN; (+) strand; PAM type: YTN; PAM sequence: TTT
  source 1..20: mol_type = other DNA
ttgtatttttagtagaggcg

SEQ ID NO: 33165 - DNA, 20 bp, synthetic construct
  misc_feature 1..20: note = Description of Artificial Sequence: Synthetic oligonucleotide
  misc_feature 1..20: note = Target: FXN; (+) strand; PAM type: YTN; PAM sequence: TTT
  source 1..20: mol_type = other DNA
tgtatttttagtagaggcga

SEQ ID NO: 33166 - DNA, 20 bp, synthetic construct
  misc_feature 1..20: note = Description of Artificial Sequence: Synthetic oligonucleotide
  misc_feature 1..20: note = Target: FXN; (+) strand; PAM type: YTN; PAM sequence: TTT
  source 1..20: mol_type = other DNA
gtatttttagtagaggcgag

SEQ ID NO: 33167 - DNA, 20 bp, synthetic construct
  misc_feature 1..20: note = Description of Artificial Sequence: Synthetic oligonucleotide
  misc_feature 1..20: note = Target: FXN; (+) strand; PAM type: YTN; PAM sequence: TTG
  source 1..20: mol_type = other DNA
tatttttagtagaggcgagg

SEQ ID NO: 33168 - DNA, 20 bp, synthetic construct
  misc_feature 1..20: note = Description of Artificial Sequence: Synthetic oligonucleotide
  misc_feature 1..20: note = Target: FXN; (+) strand; PAM type: YTN; PAM sequence: TTT
  source 1..20: mol_type = other DNA
ttagtagaggcgaggtttca

SEQ ID NO: 33169 - DNA, 20 bp, synthetic construct
  misc_feature 1..20: note = Description of Artificial Sequence: Synthetic oligonucleotide
  misc_feature 1..20: note = Target: FXN; (+) strand; PAM type: YTN; PAM sequence: TTT
  source 1..20: mol_type = other DNA
tagtagaggcgaggtttcac

SEQ ID NO: 33170 - DNA, 20 bp, synthetic construct
  misc_feature 1..20: note = Description of Artificial Sequence: Synthetic oligonucleotide
  misc_feature 1..20: note = Target: FXN; (+) strand; PAM type: YTN; PAM sequence: TTT
  source 1..20: mol_type = other DNA
agtagaggcgaggtttcacc

SEQ ID NO: 33171 - DNA, 20 bp, synthetic construct
  misc_feature 1..20: note = Description of Artificial Sequence: Synthetic oligonucleotide
  misc_feature 1..20: note = Target: FXN; (+) strand; PAM type: YTN; PAM sequence: TTA
  source 1..20: mol_type = other DNA
gtagaggcgaggtttcacca

SEQ ID NO: 33172 - DNA, 20 bp, synthetic construct
  misc_feature 1..20: note = Description of Artificial Sequence: Synthetic oligonucleotide
  misc_feature 1..20: note = Target: FXN; (+) strand; PAM type: YTN; PAM sequence: TTT
  source 1..20: mol_type = other DNA
caccatgtcagccaggctgg

SEQ ID NO: 33173 - DNA, 20 bp, synthetic construct
  misc_feature 1..20: note = Description of Artificial Sequence: Synthetic oligonucleotide
  misc_feature 1..20: note = Target: FXN; (+) strand; PAM type: YTN; PAM sequence: TTC
  source 1..20: mol_type = other DNA
accatgtcagccaggctggt

SEQ ID NO: 33174 - DNA, 20 bp, synthetic construct
  misc_feature 1..20: note = Description of Artificial Sequence: Synthetic oligonucleotide
  misc_feature 1..20: note = Target: FXN; (+) strand; PAM type: YTN; PAM sequence: CTG
  source 1..20: mol_type = other DNA
gtcttgaactcctgacctca

SEQ ID NO: 33175 - DNA, 20 bp, synthetic construct
  misc_feature 1..20: note = Description of Artificial Sequence: Synthetic oligonucleotide
  misc_feature 1..20: note = Target: FXN; (+) strand; PAM type: YTN; PAM sequence: CTT
  source 1..20: mol_type = other DNA
gaactcctgacctcaggtga

SEQ ID NO: 33176 - DNA, 20 bp, synthetic construct
  misc_feature 1..20: note = Description of Artificial Sequence: Synthetic oligonucleotide
  misc_feature 1..20: note = Target: FXN; (+) strand; PAM type: YTN; PAM sequence: TTG
  source 1..20: mol_type = other DNA
aactcctgacctcaggtgat

SEQ ID NO: 33177 - DNA, 20 bp, synthetic construct
  misc_feature 1..20: note = Description of Artificial Sequence: Synthetic oligonucleotide
  misc_feature 1..20: note = Target: FXN; (+) strand; PAM type: YTN; PAM sequence: CTC
  source 1..20: mol_type = other DNA
ctgacctcaggtgatccacc

SEQ ID NO: 33178 - DNA, 20 bp, synthetic construct
  misc_feature 1..20: note = Description of Artificial Sequence: Synthetic oligonucleotide
  misc_feature 1..20: note = Target: FXN; (+) strand; PAM type: YTN; PAM sequence: CTG
  source 1..20: mol_type = other DNA
acctcaggtgatccacccgc

SEQ ID NO: 33179 - DNA, 20 bp, synthetic construct
  misc_feature 1..20: note = Description of Artificial Sequence: Synthetic oligonucleotide
  misc_feature 1..20: note = Target: FXN; (+) strand; PAM type: YTN; PAM sequence: CTC
  source 1..20: mol_type = other DNA
aggtgatccacccgcctcag

SEQ ID NO: 33180 - DNA, 20 bp, synthetic construct
  misc_feature 1..20: note = Description of Artificial Sequence: Synthetic oligonucleotide
  misc_feature 1..20: note = Target: FXN; (+) strand; PAM type: YTN; PAM sequence: CTC
  source 1..20: mol_type = other DNA
agcctcccaaaatgctagga

SEQ ID NO: 33181 - DNA, 20 bp, synthetic construct
  misc_feature 1..20: note = Description of Artificial Sequence: Synthetic oligonucleotide
  misc_feature 1..20: note = Target: FXN; (+) strand; PAM type: YTN; PAM sequence: CTC
  source 1..20: mol_type = other DNA
ccaaaatgctaggattacag

SEQ ID NO: 33182 - DNA, 20 bp, synthetic construct
  misc_feature 1..20: note = Description of Artificial Sequence: Synthetic oligonucleotide
  misc_feature 1..20: note = Target: FXN; (+) strand; PAM type: YTN; PAM sequence: CTA
  source 1..20: mol_type = other DNA
ggattacaggcgtgagccac

SEQ ID NO: 33183 - DNA, 20 bp, synthetic construct
  misc_feature 1..20: note = Description of Artificial Sequence: Synthetic oligonucleotide
  misc_feature 1..20: note = Target: FXN; (+) strand; PAM type: YTN; PAM sequence: TTA
  source 1..20: mol_type = other DNA
caggcgtgagccaccaggcc

SEQ ID NO: 33184 - DNA, 20 bp, synthetic construct
  misc_feature 1..20: note = Description of Artificial Sequence: Synthetic oligonucleotide
  misc_feature 1..20: note = Target: FXN; (+) strand; PAM type: YTN; PAM sequence: CTA
  source 1..20: mol_type = other DNA
ttttttttttttttcttttt

SEQ ID NO: 33185 - DNA, 20 bp, synthetic construct
  misc_feature 1..20: note = Description of Artificial Sequence: Synthetic oligonucleotide
  misc_feature 1..20: note = Target: FXN; (+) strand; PAM type: YTN; PAM sequence: TTT
  source 1..20: mol_type = other DNA
tttttttttttctttttttg

SEQ ID NO: 33186 - DNA, 20 bp, synthetic construct
  misc_feature 1..20: note = Description of Artificial Sequence: Synthetic oligonucleotide
  misc_feature 1..20: note = Target: FXN; (+) strand; PAM type: YTN; PAM sequence: TTT
  source 1..20: mol_type = other DNA
ttttttttttctttttttga

SEQ ID NO: 33187 - DNA, 20 bp, synthetic construct
  misc_feature 1..20: note = Description of Artificial Sequence: Synthetic oligonucleotide
  misc_feature 1..20: note = Target: FXN; (+) strand; PAM type: YTN; PAM sequence: TTT
  source 1..20: mol_type = other DNA
tttttttttctttttttgag

SEQ ID NO: 33188 - DNA, 20 bp, synthetic construct
  misc_feature 1..20: note = Description of Artificial Sequence: Synthetic oligonucleotide
  misc_feature 1..20: note = Target: FXN; (+) strand; PAM type: YTN; PAM sequence: TTT
  source 1..20: mol_type = other DNA
ttttttttctttttttgaga

SEQ ID NO: 33189 - DNA, 20 bp, synthetic construct
  misc_feature 1..20: note = Description of Artificial Sequence: Synthetic oligonucleotide
  misc_feature 1..20: note = Target: FXN; (+) strand; PAM type: YTN; PAM sequence: TTT
  source 1..20: mol_type = other DNA
tttttttctttttttgagac

SEQ ID NO: 33190 - DNA, 20 bp, synthetic construct
  misc_feature 1..20: note = Description of Artificial Sequence: Synthetic oligonucleotide
  misc_feature 1..20: note = Target: FXN; (+) strand; PAM type: YTN; PAM sequence: TTT
  source 1..20: mol_type = other DNA
ttttttctttttttgagacg

SEQ ID NO: 33191 - DNA, 20 bp, synthetic construct
  misc_feature 1..20: note = Description of Artificial Sequence: Synthetic oligonucleotide
  misc_feature 1..20: note = Target: FXN; (+) strand; PAM type: YTN; PAM sequence: TTT
  source 1..20: mol_type = other DNA
tttttctttttttgagacgg

SEQ ID NO: 33192 - DNA, 20 bp, synthetic construct
  misc_feature 1..20: note = Description of Artificial Sequence: Synthetic oligonucleotide
  misc_feature 1..20: note = Target: FXN; (+) strand; PAM type: YTN; PAM sequence: TTT
  source 1..20: mol_type = other DNA
ttttctttttttgagacgga

SEQ ID NO: 33193 - DNA, 20 bp, synthetic construct
  misc_feature 1..20: note = Description of Artificial Sequence: Synthetic oligonucleotide
  misc_feature 1..20: note = Target: FXN; (+) strand; PAM type: YTN; PAM sequence: TTT
  source 1..20: mol_type = other DNA
tttctttttttgagacggag

SEQ ID NO: 33194 - DNA, 20 bp, synthetic construct
  misc_feature 1..20: note = Description of Artificial Sequence: Synthetic oligonucleotide
  misc_feature 1..20: note = Target: FXN; (+) strand; PAM type: YTN; PAM sequence: TTT
  source 1..20: mol_type = other DNA
ttctttttttgagacggagt

SEQ ID NO: 33195 - DNA, 20 bp, synthetic construct
  misc_feature 1..20: note = Description of Artificial Sequence: Synthetic oligonucleotide
  misc_feature 1..20: note = Target: FXN; (+) strand; PAM type: YTN; PAM sequence: TTT
  source 1..20: mol_type = other DNA
tctttttttgagacggagtc

SEQ ID NO: 33196 - DNA, 20 bp, synthetic construct
  misc_feature 1..20: note = Description of Artificial Sequence: Synthetic oligonucleotide
  misc_feature 1..20: note = Target: FXN; (+) strand; PAM type: YTN; PAM sequence: TTT
  source 1..20: mol_type = other DNA
ctttttttgagacggagtct

SEQ ID NO: 33197 - DNA, 20 bp, synthetic construct
  misc_feature 1..20: note = Description of Artificial Sequence: Synthetic oligonucleotide
  misc_feature 1..20: note = Target: FXN; (+) strand; PAM type: YTN; PAM sequence: TTC
  source 1..20: mol_type = other DNA
tttttttgagacggagtctc

SEQ ID NO: 33198 - DNA, 20 bp, synthetic construct
  misc_feature 1..20: note = Description of Artificial Sequence: Synthetic oligonucleotide
  misc_feature 1..20: note = Target: FXN; (+) strand; PAM type: YTN; PAM sequence: CTT
  source 1..20: mol_type = other DNA
tttttgagacggagtctcac

SEQ ID NO: 33199 - DNA, 20 bp, synthetic construct
  misc_feature 1..20: note = Description of Artificial Sequence: Synthetic oligonucleotide
  misc_feature 1..20: note = Target: FXN; (+) strand; PAM type: YTN; PAM sequence: TTT
  source 1..20: mol_type = other DNA
ttttgagacggagtctcact

SEQ ID NO: 33200 - DNA, 20 bp, synthetic construct
  misc_feature 1..20: note = Description of Artificial Sequence: Synthetic oligonucleotide
  misc_feature 1..20: note = Target: FXN; (+) strand; PAM type: YTN; PAM sequence: TTT
  source 1..20: mol_type = other DNA
tttgagacggagtctcactc

SEQ ID NO: 33201 - DNA, 20 bp, synthetic construct
  misc_feature 1..20: note = Description of Artificial Sequence: Synthetic oligonucleotide
  misc_feature 1..20: note = Target: FXN; (+) strand; PAM type: YTN; PAM sequence: TTT
  source 1..20: mol_type = other DNA
ttgagacggagtctcactct

SEQ ID NO: 33202 - DNA, 20 bp, synthetic construct
  misc_feature 1..20: note = Description of Artificial Sequence: Synthetic oligonucleotide
  misc_feature 1..20: note = Target: FXN; (+) strand; PAM type: YTN; PAM sequence: TTT
  source 1..20: mol_type = other DNA
tgagacggagtctcactctg

SEQ ID NO: 33203 - DNA, 20 bp, synthetic construct
  misc_feature 1..20: note = Description of Artificial Sequence: Synthetic oligonucleotide
  misc_feature 1..20: note = Target: FXN; (+) strand; PAM type: YTN; PAM sequence: TTT
  source 1..20: mol_type = other DNA
gagacggagtctcactctgt

SEQ ID NO: 33204 - DNA, 20 bp, synthetic construct
  misc_feature 1..20: note = Description of Artificial Sequence: Synthetic oligonucleotide
  misc_feature 1..20: note = Target: FXN; (+) strand; PAM type: YTN; PAM sequence: TTG
  source 1..20: mol_type = other DNA
agacggagtctcactctgtc

SEQ ID NO: 33205 - DNA, 20 bp, synthetic construct
  misc_feature 1..20: note = Description of Artificial Sequence: Synthetic oligonucleotide
  misc_feature 1..20: note = Target: FXN; (+) strand; PAM type: YTN; PAM sequence: CTC
  source 1..20: mol_type = other DNA
actctgtcacccaggctgga

SEQ ID NO: 33206 - DNA, 20 bp, synthetic construct
  misc_feature 1..20: note = Description of Artificial Sequence: Synthetic oligonucleotide
  misc_feature 1..20: note = Target: FXN; (+) strand; PAM type: YTN; PAM sequence: CTC
  source 1..20: mol_type = other DNA
tgtcacccaggctggagtgc

SEQ ID NO: 33207 - DNA, 20 bp, synthetic construct
  misc_feature 1..20: note = Description of Artificial Sequence: Synthetic oligonucleotide
  misc_feature 1..20: note = Target: FXN; (+) strand; PAM type: YTN; PAM sequence: CTG
  source 1..20: mol_type = other DNA
tcacccaggctggagtgcag

SEQ ID NO: 33208 - DNA, 20 bp, synthetic construct
  misc_feature 1..20: note = Description of Artificial Sequence: Synthetic oligonucleotide
  misc_feature 1..20: note = Target: FXN; (+) strand; PAM type: YTN; PAM sequence: CTG
  source 1..20: mol_type = other DNA
gagtgcagtggcacaatgtc

SEQ ID NO: 33209 - DNA, 20 bp, synthetic construct
  misc_feature 1..20: note = Description of Artificial Sequence: Synthetic oligonucleotide
  misc_feature 1..20: note = Target: FXN; (+) strand; PAM type: YTN; PAM sequence: CTC
  source 1..20: mol_type = other DNA
attgcaacctccacctccgg

SEQ ID NO: 33210 - DNA, 20 bp, synthetic construct
  misc_feature 1..20: note = Description of Artificial Sequence: Synthetic oligonucleotide
  misc_feature 1..20: note = Target: FXN; (+) strand; PAM type: YTN; PAM sequence: TTG
  source 1..20: mol_type = other DNA
caacctccacctccggggtt

SEQ ID NO: 33211 - DNA, 20 bp, synthetic construct
  misc_feature 1..20: note = Description of Artificial Sequence: Synthetic oligonucleotide
  misc_feature 1..20: note = Target: FXN; (+) strand; PAM type: YTN; PAM sequence: CTC
  source 1..20: mol_type = other DNA
cacctccggggtttcagtga

SEQ ID NO: 33212 - DNA, 20 bp, synthetic construct
  misc_feature 1..20: note = Description of Artificial Sequence: Synthetic oligonucleotide
  misc_feature 1..20: note = Target: FXN; (+) strand; PAM type: YTN; PAM sequence: CTC
  source 1..20: mol_type = other DNA
cggggtttcagtgattctcc

SEQ ID NO: 33213 - DNA, 20 bp, synthetic construct
  misc_feature 1..20: note = Description of Artificial Sequence: Synthetic oligonucleotide
  misc_feature 1..20: note = Target: FXN; (+) strand; PAM type: YTN; PAM sequence: TTT
  source 1..20: mol_type = other DNA
cagtgattctcctgtctcag

SEQ ID NO: 33214 - DNA, 20 bp, synthetic construct
  misc_feature 1..20: note = Description of Artificial Sequence: Synthetic oligonucleotide
  misc_feature 1..20: note = Target: FXN; (+) strand; PAM type: YTN; PAM sequence: TTC
  source 1..20: mol_type = other DNA
agtgattctcctgtctcagc

SEQ ID NO: 33215 - DNA, 20 bp, synthetic construct
  misc_feature 1..20: note = Description of Artificial Sequence: Synthetic oligonucleotide
  misc_feature 1..20: note = Target: FXN; (+) strand; PAM type: YTN; PAM sequence: TTC
  source 1..20: mol_type = other DNA
tcctgtctcagcctcccaag

SEQ ID NO: 33216 - DNA, 20 bp, synthetic construct
  misc_feature 1..20: note = Description of Artificial Sequence: Synthetic oligonucleotide
  misc_feature 1..20: note = Target: FXN; (+) strand; PAM type: YTN; PAM sequence: CTC
  source 1..20: mol_type = other DNA
ctgtctcagcctcccaagta

SEQ ID NO: 33217 - DNA, 20 bp, synthetic construct
  misc_feature 1..20: note = Description of Artificial Sequence: Synthetic oligonucleotide
  misc_feature 1..20: note = Target: FXN; (+) strand; PAM type: YTN; PAM sequence: CTG
  source 1..20: mol_type = other DNA
tctcagcctcccaagtagct

SEQ ID NO: 33218 - DNA, 20 bp, synthetic construct
  misc_feature 1..20: note = Description of Artificial Sequence: Synthetic oligonucleotide
  misc_feature 1..20: note = Target: FXN; (+) strand; PAM type: YTN; PAM sequence: CTC
  source 1..20: mol_type = other DNA
agcctcccaagtagctggga

SEQ ID NO: 33219 - DNA, 20 bp, synthetic construct
  misc_feature 1..20: note = Description of Artificial Sequence: Synthetic oligonucleotide
  misc_feature 1..20: note = Target: FXN; (+) strand; PAM type: YTN; PAM sequence: CTC
  source 1..20: mol_type = other DNA
ccaagtagctgggaactaca

SEQ ID NO: 33220 - DNA, 20 bp, synthetic construct
  misc_feature 1..20: note = Description of Artificial Sequence: Synthetic oligonucleotide
  misc_feature 1..20: note = Target: FXN; (+) strand; PAM type: YTN; PAM sequence: CTG
  source 1..20: mol_type = other DNA
ggaactacaggcgtgcacca

SEQ ID NO: 33221 - DNA, 20 bp, synthetic construct
  misc_feature 1..20: note = Description of Artificial Sequence: Synthetic oligonucleotide
  misc_feature 1..20: note = Target: FXN; (+) strand; PAM type: YTN; PAM sequence: CTA
  source 1..20: mol_type = other DNA
caggcgtgcaccacaagccc

SEQ ID NO: 33222 - DNA, 20 bp, synthetic construct
  misc_feature 1..20: note = Description of Artificial Sequence: Synthetic oligonucleotide
  misc_feature 1..20: note = Target: FXN; (+) strand; PAM type: YTN; PAM sequence: CTA
  source 1..20: mol_type = other DNA
atttttgtatttttagtaga

SEQ ID NO: 33223 - DNA, 20 bp, synthetic construct
  misc_feature 1..20: note = Description of Artificial Sequence: Synthetic oligonucleotide
  misc_feature 1..20: note = Target: FXN; (+) strand; PAM type: YTN; PAM sequence: TTT
  source 1..20: mol_type = other DNA
ttgtatttttagtagagaca

SEQ ID NO: 33224 - DNA, 20 bp, synthetic construct
  misc_feature 1..20: note = Description of Artificial Sequence: Synthetic oligonucleotide
  misc_feature 1..20: note = Target: FXN; (+) strand; PAM type: YTN; PAM sequence: TTT
  source 1..20: mol_type = other DNA
tgtatttttagtagagacag

SEQ ID NO: 33225 - DNA, 20 bp, synthetic construct
  misc_feature 1..20: note = Description of Artificial Sequence: Synthetic oligonucleotide
  misc_feature 1..20: note = Target: FXN; (+) strand; PAM type: YTN; PAM sequence: TTT
  source 1..20: mol_type = other DNA
gtatttttagtagagacagg

SEQ ID NO: 33226 - DNA, 20 bp, synthetic construct
  misc_feature 1..20: note = Description of Artificial Sequence: Synthetic oligonucleotide
  misc_feature 1..20: note = Target: FXN; (+) strand; PAM type: YTN; PAM sequence: TTG
  source 1..20: mol_type = other DNA
tatttttagtagagacaggg

SEQ ID NO: 33227 - DNA, 20 bp, synthetic construct
  misc_feature 1..20: note = Description of Artificial Sequence: Synthetic oligonucleotide
  misc_feature 1..20: note = Target: FXN; (+) strand; PAM type: YTN; PAM sequence: TTT
  source 1..20: mol_type = other DNA
ttagtagagacagggttttg

SEQ ID NO: 33228 - DNA, 20 bp, synthetic construct
  misc_feature 1..20: note = Description of Artificial Sequence: Synthetic oligonucleotide
  misc_feature 1..20: note = Target: FXN; (+) strand; PAM type: YTN; PAM sequence: TTT
  source 1..20: mol_type = other DNA
tagtagagacagggttttgc

SEQ ID NO: 33229 - DNA, 20 bp, synthetic construct
  misc_feature 1..20: note = Description of Artificial Sequence: Synthetic oligonucleotide
  misc_feature 1..20: note = Target: FXN; (+) strand; PAM type: YTN; PAM sequence: TTT
  source 1..20: mol_type = other DNA
agtagagacagggttttgcc

SEQ ID NO: 33230 - DNA, 20 bp, synthetic construct
  misc_feature 1..20: note = Description of Artificial Sequence: Synthetic oligonucleotide
  misc_feature 1..20: note = Target: FXN; (+) strand; PAM type: YTN; PAM sequence: TTA
  source 1..20: mol_type = other DNA
gtagagacagggttttgcca

SEQ ID NO: 33231 - DNA, 20 bp, synthetic construct
  misc_feature 1..20: note = Description of Artificial Sequence: Synthetic oligonucleotide
  misc_feature 1..20: note = Target: FXN; (+) strand; PAM type: YTN; PAM sequence: TTT
  source 1..20: mol_type = other DNA
tgccatattggcctggctag

SEQ ID NO: 33232 - DNA, 20 bp, synthetic construct
  misc_feature 1..20: note = Description of Artificial Sequence: Synthetic oligonucleotide
  misc_feature 1..20: note = Target: FXN; (+) strand; PAM type: YTN; PAM sequence: TTT
  source 1..20: mol_type = other DNA
gccatattggcctggctagt

SEQ ID NO: 33233 - DNA, 20 bp, synthetic construct
  misc_feature 1..20: note = Description of Artificial Sequence: Synthetic oligonucleotide
  misc_feature 1..20: note = Target: FXN; (+) strand; PAM type: YTN; PAM sequence: TTG
  source 1..20: mol_type = other DNA
ccatattggcctggctagtt

SEQ ID NO: 33234 - DNA, 20 bp, synthetic construct
  misc_feature 1..20: note = Description of Artificial Sequence: Synthetic oligonucleotide
  misc_feature 1..20: note = Target: FXN; (+) strand; PAM type: YTN; PAM sequence: TTG
  source 1..20: mol_type = other DNA
gcctggctagtttcaaactc

SEQ ID NO: 33235 - DNA, 20 bp, synthetic construct
  misc_feature 1..20: note = Description of Artificial Sequence: Synthetic oligonucleotide
  misc_feature 1..20: note = Target: FXN; (+) strand; PAM type: YTN; PAM sequence: CTG
  source 1..20: mol_type = other DNA
gctagtttcaaactcctgac

SEQ ID NO: 33236 - DNA, 20 bp, synthetic construct
  misc_feature 1..20: note = Description of Artificial Sequence: Synthetic oligonucleotide
  misc_feature 1..20: note = Target: FXN; (+) strand; PAM type: YTN; PAM sequence: CTA
  source 1..20: mol_type = other DNA
gtttcaaactcctgacctca

SEQ ID NO: 33237 - DNA, 20 bp, synthetic construct
  misc_feature 1..20: note = Description of Artificial Sequence: Synthetic oligonucleotide
  misc_feature 1..20: note = Target: FXN; (+) strand; PAM type: YTN; PAM sequence: TTT
  source 1..20: mol_type = other DNA
caaactcctgacctcaggtg

SEQ ID NO: 33238 - DNA, 20 bp, synthetic construct
  misc_feature 1..20: note = Description of Artificial Sequence: Synthetic oligonucleotide
  misc_feature 1..20: note = Target: FXN; (+) strand; PAM type: YTN; PAM sequence: TTC
  source 1..20: mol_type = other DNA
aaactcctgacctcaggtga

SEQ ID NO: 33239 - DNA, 20 bp, synthetic construct
  misc_feature 1..20: note = Description of Artificial Sequence: Synthetic oligonucleotide
  misc_feature 1..20: note = Target: FXN; (+) strand; PAM type: YTN; PAM sequence: CTC
  source 1..20: mol_type = other DNA
ctgacctcaggtgagccacc

SEQ ID NO: 33240 - DNA, 20 bp, synthetic construct
  misc_feature 1..20: note = Description of Artificial Sequence: Synthetic oligonucleotide
  misc_feature 1..20: note = Target: FXN; (+) strand; PAM type: YTN; PAM sequence: CTG
  source 1..20: mol_type = other DNA
acctcaggtgagccacctac

SEQ ID NO: 33241 - DNA, 20 bp, synthetic construct
  misc_feature 1..20: note = Description of Artificial Sequence: Synthetic oligonucleotide
  misc_feature 1..20: note = Target: FXN; (+) strand; PAM type: YTN; PAM sequence: CTC
  source 1..20: mol_type = other DNA
aggtgagccacctacctcgg

SEQ ID NO: 33242 - DNA, 20 bp, synthetic construct
  misc_feature 1..20: note = Description of Artificial Sequence: Synthetic oligonucleotide
  misc_feature 1..20: note = Target: FXN; (+) strand; PAM type: YTN; PAM sequence: CTA
  source 1..20: mol_type = other DNA
cctcggcctccgaaagtcct

SEQ ID NO: 33243 - DNA, 20 bp, synthetic construct
  misc_feature 1..20: note = Description of Artificial Sequence: Synthetic oligonucleotide
  misc_feature 1..20: note = Target: FXN; (+) strand; PAM type: YTN; PAM sequence: CTC
  source 1..20: mol_type = other DNA
ggcctccgaaagtcctggga

SEQ ID NO: 33244 - DNA, 20 bp, synthetic construct
  misc_feature 1..20: note = Description of Artificial Sequence: Synthetic oligonucleotide
  misc_feature 1..20: note = Target: FXN; (+) strand; PAM type: YTN; PAM sequence: CTC
  source 1..20: mol_type = other DNA
cgaaagtcctgggattacag

SEQ ID NO: 33245 - DNA, 20 bp, synthetic construct
  misc_feature 1..20: note = Description of Artificial Sequence: Synthetic oligonucleotide
  misc_feature 1..20: note = Target: FXN; (+) strand; PAM type: YTN; PAM sequence: CTG
  source 1..20: mol_type = other DNA
ggattacagacgtgagccac

SEQ ID NO: 33246 - DNA, 20 bp, synthetic construct
  misc_feature 1..20: note = Description of Artificial Sequence: Synthetic oligonucleotide
  misc_feature 1..20: note = Target: FXN; (+) strand; PAM type: YTN; PAM sequence: TTA
  source 1..20: mol_type = other DNA
cagacgtgagccactgcact

SEQ ID NO: 33247 - DNA, 20 bp, synthetic construct
  misc_feature 1..20: note = Description of Artificial Sequence: Synthetic oligonucleotide
  misc_feature 1..20: note = Target: FXN; (+) strand; PAM type: YTN; PAM sequence: CTG
  source 1..20: mol_type = other DNA
cactgcctggcccagaaagg

SEQ ID NO: 33248 - DNA, 20 bp, synthetic construct
  misc_feature 1..20: note = Description of Artificial Sequence: Synthetic oligonucleotide
  misc_feature 1..20: note = Target: FXN; (+) strand; PAM type: YTN; PAM sequence: CTG
  source 1..20: mol_type = other DNA
cctggcccagaaaggactat

SEQ ID NO: 33249 - DNA, 20 bp, synthetic construct
  misc_feature 1..20: note = Description of Artificial Sequence: Synthetic oligonucleotide
  misc_feature 1..20: note = Target: FXN; (+) strand; PAM type: YTN; PAM sequence: CTG
  source 1..20: mol_type = other DNA
gcccagaaaggactattaat

SEQ ID NO: 33250 - DNA, 20 bp, synthetic construct
  misc_feature 1..20: note = Description of Artificial Sequence: Synthetic oligonucleotide
  misc_feature 1..20: note = Target: FXN; (+) strand; PAM type: YTN; PAM sequence: CTA
  source 1..20: mol_type = other DNA
ttaattgtagttgcctctgg

SEQ ID NO: 33251 - DNA, 20 bp, synthetic construct
  misc_feature 1..20: note = Description of Artificial Sequence: Synthetic oligonucleotide
  misc_feature 1..20: note = Target: FXN; (+) strand; PAM type: YTN; PAM sequence: TTA
  source 1..20: mol_type = other DNA
attgtagttgcctctgggaa

SEQ ID NO: 33252 - DNA, 20 bp, synthetic construct
  misc_feature 1..20: note = Description of Artificial Sequence: Synthetic oligonucleotide
  misc_feature 1..20: note = Target: FXN; (+) strand; PAM type: YTN; PAM sequence: TTG
  source 1..20: mol_type = other DNA
tagttgcctctgggaatggg

SEQ ID NO: 33253 - DNA, 20 bp, synthetic construct
  misc_feature 1..20: note = Description of Artificial Sequence: Synthetic oligonucleotide
  misc_feature 1..20: note = Target: FXN; (+) strand; PAM type: YTN; PAM sequence: TTG
  source 1..20: mol_type = other DNA
cctctgggaatgggggctgc

SEQ ID NO: 33254 - DNA, 20 bp, synthetic construct
  misc_feature 1..20: note = Description of Artificial Sequence: Synthetic oligonucleotide
  misc_feature 1..20: note = Target: FXN; (+) strand; PAM type: YTN; PAM sequence: CTC
  source 1..20: mol_type = other DNA
tgggaatgggggctgcctgc

SEQ ID NO: 33255 - DNA, 20 bp, synthetic construct
  misc_feature 1..20: note = Description of Artificial Sequence: Synthetic oligonucleotide
  misc_feature 1..20: note = Target: FXN; (+) strand; PAM type: YTN; PAM sequence: CTG
  source 1..20: mol_type = other DNA
ggaatgggggctgcctgctt

SEQ ID NO: 33256 - DNA, 20 bp, synthetic construct
  misc_feature 1..20: note = Description of Artificial Sequence: Synthetic oligonucleotide
  misc_feature 1..20: note = Target: FXN; (+) strand; PAM type: YTN; PAM sequence: CTG
  source 1..20: mol_type = other DNA
cctgcttctttctgtaaccc

SEQ ID NO: 33257 - DNA, 20 bp, synthetic construct
  misc_feature 1..20: note = Description of Artificial Sequence: Synthetic oligonucleotide
  misc_feature 1..20: note = Target: FXN; (+) strand; PAM type: YTN; PAM sequence: CTG
  source 1..20: mol_type = other DNA
cttctttctgtaaccccttc

SEQ ID NO: 33258 - DNA, 20 bp, synthetic construct
  misc_feature 1..20: note = Description of Artificial Sequence: Synthetic oligonucleotide
  misc_feature 1..20: note = Target: FXN; (+) strand; PAM type: YTN; PAM sequence: CTT
  source 1..20: mol_type = other DNA
ctttctgtaaccccttctgt

SEQ ID NO: 33259 - DNA, 20 bp, synthetic construct
  misc_feature 1..20: note = Description of Artificial Sequence: Synthetic oligonucleotide
  misc_feature 1..20: note = Target: FXN; (+) strand; PAM type: YTN; PAM sequence: TTC
  source 1..20: mol_type = other DNA
tttctgtaaccccttctgtg

SEQ ID NO: 33260 - DNA, 20 bp, synthetic construct
  misc_feature 1..20: note = Description of Artificial Sequence: Synthetic oligonucleotide
  misc_feature 1..20: note = Target: FXN; (+) strand; PAM type: YTN; PAM sequence: CTT
  source 1..20: mol_type = other DNA
tctgtaaccccttctgtgct

SEQ ID NO: 33261 - DNA, 20 bp, synthetic construct
  misc_feature 1..20: note = Description of Artificial Sequence: Synthetic oligonucleotide
  misc_feature 1..20: note = Target: FXN; (+) strand; PAM type: YTN; PAM sequence: TTT
  source 1..20: mol_type = other DNA
ctgtaaccccttctgtgctg

SEQ ID NO: 33262 - DNA, 20 bp, synthetic construct
  misc_feature 1..20: note = Description of Artificial Sequence: Synthetic oligonucleotide
  misc_feature 1..20: note = Target: FXN; (+) strand; PAM type: YTN; PAM sequence: TTC
  source 1..20: mol_type = other DNA
tgtaaccccttctgtgctgt

SEQ ID NO: 33263 - DNA, 20 bp, synthetic construct
  misc_feature 1..20: note = Description of Artificial Sequence: Synthetic oligonucleotide
  misc_feature 1..20: note = Target: FXN; (+) strand; PAM type: YTN; PAM sequence: CTG
  source 1..20: mol_type = other DNA
taaccccttctgtgctgttt

SEQ ID NO: 33264 - DNA, 20 bp, synthetic construct
  misc_feature 1..20: note = Description of Artificial Sequence: Synthetic oligonucleotide
  misc_feature 1..20: note = Target: FXN; (+) strand; PAM type: YTN; PAM sequence: CTT
  source 1..20: mol_type = other DNA
ctgtgctgtttaaatttttt

SEQ ID NO: 33265 - DNA, 20 bp, synthetic construct
  misc_feature 1..20: note = Description of Artificial Sequence: Synthetic oligonucleotide
  misc_feature 1..20: note = Target: FXN; (+) strand; PAM type: YTN; PAM sequence: TTC
  source 1..20: mol_type = other DNA
tgtgctgtttaaattttttt

SEQ ID NO: 33266 - DNA, 20 bp, synthetic construct
  misc_feature 1..20: note = Description of Artificial Sequence: Synthetic oligonucleotide
  misc_feature 1..20: note = Target: FXN; (+) strand; PAM type: YTN; PAM sequence: CTG
  source 1..20: mol_type = other DNA
tgctgtttaaattttttttt

SEQ ID NO: 33267 - DNA, 20 bp, synthetic construct
  misc_feature 1..20: note = Description of Artificial Sequence: Synthetic oligonucleotide
  misc_feature 1..20: note = Target: FXN; (+) strand; PAM type: YTN; PAM sequence: CTG
  source 1..20: mol_type = other DNA
tttaaatttttttttttttt

SEQ ID NO: 33268 - DNA, 20 bp, synthetic construct
  misc_feature 1..20: note = Description of Artificial Sequence: Synthetic oligonucleotide
  misc_feature 1..20: note = Target: FXN; (+) strand; PAM type: YTN; PAM sequence: TTT
  source 1..20: mol_type = other DNA
aaattttttttttttttttt

SEQ ID NO: 33269 - DNA, 20 bp, synthetic construct
  misc_feature 1..20: note = Description of Artificial Sequence: Synthetic oligonucleotide
  misc_feature 1..20: note = Target: FXN; (+) strand; PAM type: YTN; PAM sequence: TTA
  source 1..20: mol_type = other DNA
aatttttttttttttttttt

SEQ ID NO: 33270 - DNA, 20 bp, synthetic construct
  misc_feature 1..20: note = Description of Artificial Sequence: Synthetic oligonucleotide
  misc_feature 1..20: note = Target: FXN; (+) strand; PAM type: YTN; PAM sequence: TTT
  source 1..20: mol_type = other DNA
tttttttttttttttttttt

SEQ ID NO: 33271 - DNA, 20 bp, synthetic construct
  misc_feature 1..20: note = Description of Artificial Sequence: Synthetic oligonucleotide
  misc_feature 1..20: note = Target: FXN; (+) strand; PAM type: YTN; PAM sequence: TTT
  source 1..20: mol_type = other DNA
tttttttttttttttttttg

SEQ ID NO: 33272 - DNA, 20 bp, synthetic construct
  misc_feature 1..20: note = Description of Artificial Sequence: Synthetic oligonucleotide
  misc_feature 1..20: note = Target: FXN; (+) strand; PAM type: YTN; PAM sequence: TTT
  source 1..20: mol_type = other DNA
ttttttttttttttttttga

SEQ ID NO: 33273 - DNA, 20 bp, synthetic construct
  misc_feature 1..20: note = Description of Artificial Sequence: Synthetic oligonucleotide
  misc_feature 1..20: note = Target: FXN; (+) strand; PAM type: YTN; PAM sequence: TTT
  source 1..20: mol_type = other DNA
tttttttttttttttttgag

SEQ ID NO: 33274 - DNA, 20 bp, synthetic construct
  misc_feature 1..20: note = Description of Artificial Sequence: Synthetic oligonucleotide
  misc_feature 1..20: note = Target: FXN; (+) strand; PAM type: YTN; PAM sequence: TTT
  source 1..20: mol_type = other DNA
ttttttttttttttttgaga

SEQ ID NO: 33275 - DNA, 20 bp, synthetic construct
  misc_feature 1..20: note = Description of Artificial Sequence: Synthetic oligonucleotide
  misc_feature 1..20: note = Target: FXN; (+) strand; PAM type: YTN; PAM sequence: TTT
  source 1..20: mol_type = other DNA
tttttttttttttttgagac

SEQ ID NO: 33276 - DNA, 20 bp, synthetic construct
  misc_feature 1..20: note = Description of Artificial Sequence: Synthetic oligonucleotide
  misc_feature 1..20: note = Target: FXN; (+) strand; PAM type: YTN; PAM sequence: TTT
  source 1..20: mol_type = other DNA
ttttttttttttttgagaca

SEQ ID NO: 33277 - DNA, 20 bp, synthetic construct
  misc_feature 1..20: note = Description of Artificial Sequence: Synthetic oligonucleotide
  misc_feature 1..20: note = Target: FXN; (+) strand; PAM type: YTN; PAM sequence: TTT
  source 1..20: mol_type = other DNA
tttttttttttttgagacag

SEQ ID NO: 33278 - DNA, 20 bp, synthetic construct
  misc_feature 1..20: note = Description of Artificial Sequence: Synthetic oligonucleotide
  misc_feature 1..20: note = Target: FXN; (+) strand; PAM type: YTN; PAM sequence: TTT
  source 1..20: mol_type = other DNA
ttttttttttttgagacaga

SEQ ID NO: 33279 - DNA, 20 bp, synthetic construct
  misc_feature 1..20: note = Description of Artificial Sequence: Synthetic oligonucleotide
  misc_feature 1..20: note = Target: FXN; (+) strand; PAM type: YTN; PAM sequence: TTT
  source 1..20: mol_type = other DNA
tttttttttttgagacagag

SEQ ID NO: 33280 - DNA, 20 bp, synthetic construct
  misc_feature 1..20: note = Description of Artificial Sequence: Synthetic oligonucleotide
  misc_feature 1..20: note = Target: FXN; (+) strand; PAM type: YTN; PAM sequence: TTT
  source 1..20: mol_type = other DNA
ttttttttttgagacagagt

SEQ ID NO: 33281 - DNA, 20 bp, synthetic construct
  misc_feature 1..20: note = Description of Artificial Sequence: Synthetic oligonucleotide
  misc_feature 1..20: note = Target: FXN; (+) strand; PAM type: YTN; PAM sequence: TTT
  source 1..20: mol_type = other DNA
tttttttttgagacagagtc

SEQ ID NO: 33282 - DNA, 20 bp, synthetic construct
  misc_feature 1..20: note = Description of Artificial Sequence: Synthetic oligonucleotide
  misc_feature 1..20: note = Target: FXN; (+) strand; PAM type: YTN; PAM sequence: TTT
  source 1..20: mol_type = other DNA
ttttttttgagacagagtct

SEQ ID NO: 33283 - DNA, 20 bp, synthetic construct
  misc_feature 1..20: note = Description of Artificial Sequence: Synthetic oligonucleotide
  misc_feature 1..20: note = Target: FXN; (+) strand; PAM type: YTN; PAM sequence: TTT
  source 1..20: mol_type = other DNA
tttttttgagacagagtctc

SEQ ID NO: 33284 - DNA, 20 bp, synthetic construct
  misc_feature 1..20: note = Description of Artificial Sequence: Synthetic oligonucleotide
  misc_feature 1..20: note = Target: FXN; (+) strand; PAM type: YTN; PAM sequence: TTT
  source 1..20: mol_type = other DNA
ttttttgagacagagtctcg

SEQ ID NO: 33285 - DNA, 20 bp, synthetic construct
  misc_feature 1..20: note = Description of Artificial Sequence: Synthetic oligonucleotide
  misc_feature 1..20: note = Target: FXN; (+) strand; PAM type: YTN; PAM sequence: TTT
  source 1..20: mol_type = other DNA
tttttgagacagagtctcgc

SEQ ID NO: 33286 - DNA, 20 bp, synthetic construct
  misc_feature 1..20: note = Description of Artificial Sequence: Synthetic oligonucleotide
  misc_feature 1..20: note = Target: FXN; (+) strand; PAM type: YTN; PAM sequence: TTT
  source 1..20: mol_type = other DNA
ttttgagacagagtctcgct

SEQ ID NO: 33287 - DNA, 20 bp, synthetic construct
  misc_feature 1..20: note = Description of Artificial Sequence: Synthetic oligonucleotide
  misc_feature 1..20: note = Target: FXN; (+) strand; PAM type: YTN; PAM sequence: TTT
  source 1..20: mol_type = other DNA
tttgagacagagtctcgctc

SEQ ID NO: 33288 - DNA, 20 bp, synthetic construct
  misc_feature 1..20: note = Description of Artificial Sequence: Synthetic oligonucleotide
  misc_feature 1..20: note = Target: FXN; (+) strand; PAM type: YTN; PAM sequence: TTT
  source 1..20: mol_type = other DNA
ttgagacagagtctcgctct

SEQ ID NO: 33289 - DNA, 20 bp, synthetic construct
  misc_feature 1..20: note = Description of Artificial Sequence: Synthetic oligonucleotide
  misc_feature 1..20: note = Target: FXN; (+) strand; PAM type: YTN; PAM sequence: TTT
  source 1..20: mol_type = other DNA
tgagacagagtctcgctctg

SEQ ID NO: 33290 - DNA, 20 bp, synthetic construct
  misc_feature 1..20: note = Description of Artificial Sequence: Synthetic oligonucleotide
  misc_feature 1..20: note = Target: FXN; (+) strand; PAM type: YTN; PAM sequence: TTT
  source 1..20: mol_type = other DNA
gagacagagtctcgctctgt

SEQ ID NO: 33291 - DNA, 20 bp, synthetic construct
  misc_feature 1..20: note = Description of Artificial Sequence: Synthetic oligonucleotide
  misc_feature 1..20: note = Target: FXN; (+) strand; PAM type: YTN; PAM sequence: TTG
  source 1..20: mol_type = other DNA
agacagagtctcgctctgtc

SEQ ID NO: 33292 - DNA, 20 bp, synthetic construct
  misc_feature 1..20: note = Description of Artificial Sequence: Synthetic oligonucleotide
  misc_feature 1..20: note = Target: FXN; (+) strand; PAM type: YTN; PAM sequence: CTC
  source 1..20: mol_type = other DNA
gctctgtcgcccaggctgga

SEQ ID NO: 33293 - DNA, 20 bp, synthetic construct
  misc_feature 1..20: note = Description of Artificial Sequence: Synthetic oligonucleotide
  misc_feature 1..20: note = Target: FXN; (+) strand; PAM type: YTN; PAM sequence: CTC
  source 1..20: mol_type = other DNA
tgtcgcccaggctggagtgc

SEQ ID NO: 33294 - DNA, 20 bp, synthetic construct
  misc_feature 1..20: note = Description of Artificial Sequence: Synthetic oligonucleotide
  misc_feature 1..20: note = Target: FXN; (+) strand; PAM type: YTN; PAM sequence: CTG
  source 1..20: mol_type = other DNA
tcgcccaggctggagtgcag

SEQ ID NO: 33295 - DNA, 20 bp, synthetic construct
  misc_feature 1..20: note = Description of Artificial Sequence: Synthetic oligonucleotide
  misc_feature 1..20: note = Target: FXN; (+) strand; PAM type: YTN; PAM sequence: CTG
  source 1..20: mol_type = other DNA
gagtgcagtggcgcaatctc

SEQ ID NO: 33296 - DNA, 20 bp, synthetic construct
  misc_feature 1..20: note = Description of Artificial Sequence: Synthetic oligonucleotide
  misc_feature 1..20: note = Target: FXN; (+) strand; PAM type: YTN; PAM sequence: CTC
  source 1..20: mol_type = other DNA
ggctcactgcaagctccgcc

SEQ ID NO: 33297 - DNA, 20 bp, synthetic construct
  misc_feature 1..20: note = Description of Artificial Sequence: Synthetic oligonucleotide
  misc_feature 1..20: note = Target: FXN; (+) strand; PAM type: YTN; PAM sequence: CTC
  source 1..20: mol_type = other DNA
actgcaagctccgcctccca

SEQ ID NO: 33298 - DNA, 20 bp, synthetic construct
  misc_feature 1..20: note = Description of Artificial Sequence: Synthetic oligonucleotide
  misc_feature 1..20: note = Target: FXN; (+) strand; PAM type: YTN; PAM sequence: CTG
  source 1..20: mol_type = other DNA
caagctccgcctcccaggtt

SEQ ID NO: 33299 - DNA, 20 bp, synthetic construct
  misc_feature 1..20: note = Description of Artificial Sequence: Synthetic oligonucleotide
  misc_feature 1..20: note = Target: FXN; (+) strand; PAM type: YTN; PAM sequence: CTC
  source 1..20: mol_type = other DNA
cgcctcccaggttcacgcca

SEQ ID NO: 33300 - DNA, 20 bp, synthetic construct
  misc_feature 1..20: note = Description of Artificial Sequence: Synthetic oligonucleotide
  misc_feature 1..20: note = Target: FXN; (+) strand; PAM type: YTN; PAM sequence: CTC
  source 1..20: mol_type = other DNA
ccaggttcacgccattctcc

SEQ ID NO: 33301 - DNA, 20 bp, synthetic construct
  misc_feature 1..20: note = Description of Artificial Sequence: Synthetic oligonucleotide
  misc_feature 1..20: note = Target: FXN; (+) strand; PAM type: YTN; PAM sequence: TTC
  source 1..20: mol_type = other DNA
acgccattctcctgcctcag

SEQ ID NO: 33302 - DNA, 20 bp, synthetic construct
  misc_feature 1..20: note = Description of Artificial Sequence: Synthetic oligonucleotide
  misc_feature 1..20: note = Target: FXN; (+) strand; PAM type: YTN; PAM sequence: TTC
  source 1..20: mol_type = other DNA
tcctgcctcagcctcctgag

SEQ ID NO: 33303 - DNA, 20 bp, synthetic construct
  misc_feature 1..20: note = Description of Artificial Sequence: Synthetic oligonucleotide
  misc_feature 1..20: note = Target: FXN; (+) strand; PAM type: YTN; PAM sequence: CTC
  source 1..20: mol_type = other DNA
ctgcctcagcctcctgagta

SEQ ID NO: 33304 - DNA, 20 bp, synthetic construct
  misc_feature 1..20: note = Description of Artificial Sequence: Synthetic oligonucleotide
  misc_feature 1..20: note = Target: FXN; (+) strand; PAM type: YTN; PAM sequence: CTG
  source 1..20: mol_type = other DNA
cctcagcctcctgagtagct

SEQ ID NO: 33305 - DNA, 20 bp, synthetic construct
  misc_feature 1..20: note = Description of Artificial Sequence: Synthetic oligonucleotide
  misc_feature 1..20: note = Target: FXN; (+) strand; PAM type: YTN; PAM sequence: CTC
  source 1..20: mol_type = other DNA
agcctcctgagtagctggga

SEQ ID NO: 33306 - DNA, 20 bp, synthetic construct
  misc_feature 1..20: note = Description of Artificial Sequence: Synthetic oligonucleotide
  misc_feature 1..20: note = Target: FXN; (+) strand; PAM type: YTN; PAM sequence: CTC
  source 1..20: mol_type = other DNA
ctgagtagctgggactacag

SEQ ID NO: 33307 - DNA, 20 bp, synthetic construct
  misc_feature 1..20: note = Description of Artificial Sequence: Synthetic oligonucleotide
  misc_feature 1..20: note = Target: FXN; (+) strand; PAM type: YTN; PAM sequence: CTG
  source 1..20: mol_type = other DNA
agtagctgggactacaggca

SEQ ID NO: 33308 - DNA, 20 bp, synthetic construct
  misc_feature 1..20: note = Description of Artificial Sequence: Synthetic oligonucleotide
  misc_feature 1..20: note = Target: FXN; (+) strand; PAM type: YTN; PAM sequence: CTG
  source 1..20: mol_type = other DNA
ggactacaggcacccgtcac

SEQ ID NO: 33309 - DNA, 20 bp, synthetic construct
  misc_feature 1..20: note = Description of Artificial Sequence: Synthetic oligonucleotide
  misc_feature 1..20: note = Target: FXN; (+) strand; PAM type: YTN; PAM sequence: CTA
  source 1..20: mol_type = other DNA
caggcacccgtcaccacgcc

SEQ ID NO: 33310 - DNA, 20 bp, synthetic construct
  misc_feature 1..20: note = Description of Artificial Sequence: Synthetic oligonucleotide
  misc_feature 1..20: note = Target: FXN; (+) strand; PAM type: YTN; PAM sequence: CTA
  source 1..20: mol_type = other DNA
attttttgtattttcagtag

SEQ ID NO: 33311 - DNA, 20 bp, synthetic construct
  misc_feature 1..20: note = Description of Artificial Sequence: Synthetic oligonucleotide
  misc_feature 1..20: note = Target: FXN; (+) strand; PAM type: YTN; PAM sequence: TTT
  source 1..20: mol_type = other DNA
tttgtattttcagtagagac

SEQ ID NO: 33312 - DNA, 20 bp, synthetic construct
  misc_feature 1..20: note = Description of Artificial Sequence: Synthetic oligonucleotide
  misc_feature 1..20: note = Target: FXN; (+) strand; PAM type: YTN; PAM sequence: TTT
  source 1..20: mol_type = other DNA
ttgtattttcagtagagacg

SEQ ID NO: 33313 - DNA, 20 bp, synthetic construct
  misc_feature 1..20: note = Description of Artificial Sequence: Synthetic oligonucleotide
  misc_feature 1..20: note = Target: FXN; (+) strand; PAM type: YTN; PAM sequence: TTT
  source 1..20: mol_type = other DNA
tgtattttcagtagagacgg

SEQ ID NO: 33314 - DNA, 20 bp, synthetic construct
  misc_feature 1..20: note = Description of Artificial Sequence: Synthetic oligonucleotide
  misc_feature 1..20: note = Target: FXN; (+) strand; PAM type: YTN; PAM sequence: TTT
  source 1..20: mol_type = other DNA
gtattttcagtagagacggg

SEQ ID NO: 33315 - DNA, 20 bp, synthetic construct
  misc_feature 1..20: note = Description of Artificial Sequence: Synthetic oligonucleotide
  misc_feature 1..20: note = Target: FXN; (+) strand; PAM type: YTN; PAM sequence: TTG
  source 1..20: mol_type = other DNA
tattttcagtagagacgggg

SEQ ID NO: 33316 - DNA, 20 bp, synthetic construct
  misc_feature 1..20: note = Description of Artificial Sequence: Synthetic oligonucleotide
  misc_feature 1..20: note = Target: FXN; (+) strand; PAM type: YTN; PAM sequence: TTT
  source 1..20: mol_type = other DNA
tcagtagagacggggtttca

SEQ ID NO: 33317 - DNA, 20 bp, synthetic construct
  misc_feature 1..20: note = Description of Artificial Sequence: Synthetic oligonucleotide
  misc_feature 1..20: note = Target: FXN; (+) strand; PAM type: YTN; PAM sequence: TTT
  source 1..20: mol_type = other DNA
cagtagagacggggtttcac

SEQ ID NO: 33318 - DNA, 20 bp, synthetic construct
  misc_feature 1..20: note = Description of Artificial Sequence: Synthetic oligonucleotide
  misc_feature 1..20: note = Target: FXN; (+) strand; PAM type: YTN; PAM sequence: TTC
  source 1..20: mol_type = other DNA
agtagagacggggtttcacc

SEQ ID NO: 33319 - DNA, 20 bp, synthetic construct
  misc_feature 1..20: note = Description of Artificial Sequence: Synthetic oligonucleotide
  misc_feature 1..20: note = Target: FXN; (+) strand; PAM type: YTN; PAM sequence: TTT
  source 1..20: mol_type = other DNA
caccatgttagccaggatgg

SEQ ID NO: 33320 - DNA, 20 bp, synthetic construct
  misc_feature 1..20: note = Description of Artificial Sequence: Synthetic oligonucleotide
  misc_feature 1..20: note = Target: FXN; (+) strand; PAM type: YTN; PAM sequence: TTC
  source 1..20: mol_type = other DNA
accatgttagccaggatggt

SEQ ID NO: 33321 - DNA, 20 bp, synthetic construct
  misc_feature 1..20: note = Description of Artificial Sequence: Synthetic oligonucleotide
  misc_feature 1..20: note = Target: FXN; (+) strand; PAM type: YTN; PAM sequence: TTA
  source 1..20: mol_type = other DNA
gccaggatggtctcgatctc

SEQ ID NO: 33322 - DNA, 20 bp, synthetic construct
  misc_feature 1..20: note = Description of Artificial Sequence: Synthetic oligonucleotide
  misc_feature 1..20: note = Target: FXN; (+) strand; PAM type: YTN; PAM sequence: CTC
  source 1..20: mol_type = other DNA
gatctcctgaccgtgttatc

SEQ ID NO: 33323 - DNA, 20 bp, synthetic construct
  misc_feature 1..20: note = Description of Artificial Sequence: Synthetic oligonucleotide
  misc_feature 1..20: note = Target: FXN; (+) strand; PAM type: YTN; PAM sequence: CTC
  source 1..20: mol_type = other DNA
ctgaccgtgttatctgcctg

SEQ ID NO: 33324 - DNA, 20 bp, synthetic construct
  misc_feature 1..20: note = Description of Artificial Sequence: Synthetic oligonucleotide
  misc_feature 1..20: note = Target: FXN; (+) strand; PAM type: YTN; PAM sequence: CTG
  source 1..20: mol_type = other DNA
accgtgttatctgcctgcct

SEQ ID NO: 33325 - DNA, 20 bp, synthetic construct
  misc_feature 1..20: note = Description of Artificial Sequence: Synthetic oligonucleotide
  misc_feature 1..20: note = Target: FXN; (+) strand; PAM type: YTN; PAM sequence: TTA
  source 1..20: mol_type = other DNA
tctgcctgcctcggcctccc

SEQ ID NO: 33326 - DNA, 20 bp, synthetic construct
  misc_feature 1..20: note = Description of Artificial Sequence: Synthetic oligonucleotide
  misc_feature 1..20: note = Target: FXN; (+) strand; PAM type: YTN; PAM sequence: CTG
  source 1..20: mol_type = other DNA
cctgcctcggcctcccagag

SEQ ID NO: 33327 - DNA, 20 bp, synthetic construct
  misc_feature 1..20: note = Description of Artificial Sequence: Synthetic oligonucleotide
  misc_feature 1..20: note = Target: FXN; (+) strand; PAM type: YTN; PAM sequence: CTG
  source 1..20: mol_type = other DNA
cctcggcctcccagagtgct

SEQ ID NO: 33328 - DNA, 20 bp, synthetic construct
  misc_feature 1..20: note = Description of Artificial Sequence: Synthetic oligonucleotide
  misc_feature 1..20: note = Target: FXN; (+) strand; PAM type: YTN; PAM sequence: CTC
  source 1..20: mol_type = other DNA
ggcctcccagagtgctggga

SEQ ID NO: 33329 - DNA, 20 bp, synthetic construct
  misc_feature 1..20: note = Description of Artificial Sequence: Synthetic oligonucleotide
  misc_feature 1..20: note = Target: FXN; (+) strand; PAM type: YTN; PAM sequence: CTC
  source 1..20: mol_type = other DNA
ccagagtgctgggattacag

SEQ ID NO: 33330 - DNA, 20 bp, synthetic construct
  misc_feature 1..20: note = Description of Artificial Sequence: Synthetic oligonucleotide
  misc_feature 1..20: note = Target: FXN; (+) strand; PAM type: YTN; PAM sequence: CTG
  source 1..20: mol_type = other DNA
ggattacaggcatgagctac

SEQ ID NO: 33331 - DNA, 20 bp, synthetic construct
  misc_feature 1..20: note = Description of Artificial Sequence: Synthetic oligonucleotide
  misc_feature 1..20: note = Target: FXN; (+) strand; PAM type: YTN; PAM sequence: TTA
  source 1..20: mol_type = other DNA
caggcatgagctaccacgcc

SEQ ID NO: 33332 - DNA, 20 bp, synthetic construct
  misc_feature 1..20: note = Description of Artificial Sequence: Synthetic oligonucleotide
  misc_feature 1..20: note = Target: FXN; (+) strand; PAM type: YTN; PAM sequence: CTA
  source 1..20: mol_type = other DNA
ccacgcccggcctttaaatt

SEQ ID NO: 33333 - DNA, 20 bp, synthetic construct
  misc_feature 1..20: note = Description of Artificial Sequence: Synthetic oligonucleotide
  misc_feature 1..20: note = Target: FXN; (+) strand; PAM type: YTN; PAM sequence: CTT
  source 1..20: mol_type = other DNA
taaatttttactttgggccg

SEQ ID NO: 33334 - DNA, 20 bp, synthetic construct
  misc_feature 1..20: note = Description of Artificial Sequence: Synthetic oligonucleotide
  misc_feature 1..20: note = Target: FXN; (+) strand; PAM type: YTN; PAM sequence: TTT
  source 1..20: mol_type = other DNA
aaatttttactttgggccgg

SEQ ID NO: 33335 - DNA, 20 bp, synthetic construct
  misc_feature 1..20: note = Description of Artificial Sequence: Synthetic oligonucleotide
  misc_feature 1..20: note = Target: FXN; (+) strand; PAM type: YTN; PAM sequence: TTA
  source 1..20: mol_type = other DNA
aatttttactttgggccggg

SEQ ID NO: 33336 - DNA, 20 bp, synthetic construct
  misc_feature 1..20: note = Description of Artificial Sequence: Synthetic oligonucleotide
  misc_feature 1..20: note = Target: FXN; (+) strand; PAM type: YTN; PAM sequence: TTT
  source 1..20: mol_type = other DNA
ttactttgggccgggcacgg

SEQ ID NO: 33337 - DNA, 20 bp, synthetic construct
  misc_feature 1..20: note = Description of Artificial Sequence: Synthetic oligonucleotide
  misc_feature 1..20: note = Target: FXN; (+) strand; PAM type: YTN; PAM sequence: TTT
  source 1..20: mol_type = other DNA
tactttgggccgggcacggt

SEQ ID NO: 33338 - DNA, 20 bp, synthetic construct
  misc_feature 1..20: note = Description of Artificial Sequence: Synthetic oligonucleotide
  misc_feature 1..20: note = Target: FXN; (+) strand; PAM type: YTN; PAM sequence: TTT
  source 1..20: mol_type = other DNA
actttgggccgggcacggtg

SEQ ID NO: 33339 - DNA, 20 bp, synthetic construct
  misc_feature 1..20: note = Description of Artificial Sequence: Synthetic oligonucleotide
  misc_feature 1..20: note = Target: FXN; (+) strand; PAM type: YTN; PAM sequence: TTA
  source 1..20: mol_type = other DNA
ctttgggccgggcacggtgc

SEQ ID NO: 33340 - DNA, 20 bp, synthetic construct
  misc_feature 1..20: note = Description of Artificial Sequence: Synthetic oligonucleotide
  misc_feature 1..20: note = Target: FXN; (+) strand; PAM type: YTN; PAM sequence: CTT
  source 1..20: mol_type = other DNA
tgggccgggcacggtgcctt

SEQ ID NO: 33341 - DNA, 20 bp, synthetic construct
  misc_feature 1..20: note = Description of Artificial Sequence: Synthetic oligonucleotide
  misc_feature 1..20: note = Target: FXN; (+) strand; PAM type: YTN; PAM sequence: TTT
  source 1..20: mol_type = other DNA
gggccgggcacggtgcctta

SEQ ID NO: 33342 - DNA, 20 bp, synthetic construct
  misc_feature 1..20: note = Description of Artificial Sequence: Synthetic oligonucleotide
  misc_feature 1..20: note = Target: FXN; (+) strand; PAM type: YTN; PAM sequence: TTG
  source 1..20: mol_type = other DNA
ggccgggcacggtgccttac

SEQ ID NO: 33343 - DNA, 20 bp, synthetic construct
  misc_feature 1..20: note = Description of Artificial Sequence: Synthetic oligonucleotide
  misc_feature 1..20: note = Target: FXN; (+) strand; PAM type: YTN; PAM sequence: CTT
  source 1..20: mol_type = other DNA
acgcctgtaatcctaacatt

SEQ ID NO: 33344 - DNA, 20 bp, synthetic construct
  misc_feature 1..20: note = Description of Artificial Sequence: Synthetic oligonucleotide
  misc_feature 1..20: note = Target: FXN; (+) strand; PAM type: YTN; PAM sequence: TTA
  source 1..20: mol_type = other DNA
cgcctgtaatcctaacattt

SEQ ID NO: 33345 - DNA, 20 bp, synthetic construct
  misc_feature 1..20: note = Description of Artificial Sequence: Synthetic oligonucleotide
  misc_feature 1..20: note = Target: FXN; (+) strand; PAM type: YTN; PAM sequence: CTG
  source 1..20: mol_type = other DNA
taatcctaacatttcgagaa

SEQ ID NO: 33346 - DNA, 20 bp, synthetic construct
  misc_feature 1..20: note = Description of Artificial Sequence: Synthetic oligonucleotide
  misc_feature 1..20: note = Target: FXN; (+) strand; PAM type: YTN; PAM sequence: CTA
  source 1..20: mol_type = other DNA
acatttcgagaagctgaggc

SEQ ID NO: 33347 - DNA, 20 bp, synthetic construct
  misc_feature 1..20: note = Description of Artificial Sequence: Synthetic oligonucleotide
  misc_feature 1..20: note = Target: FXN; (+) strand; PAM type: YTN; PAM sequence: TTT
  source 1..20: mol_type = other DNA
cgagaagctgaggcacgtgg

SEQ ID NO: 33348 - DNA, 20 bp, synthetic construct
  misc_feature 1..20: note = Description of Artificial Sequence: Synthetic oligonucleotide
  misc_feature 1..20: note = Target: FXN; (+) strand; PAM type: YTN; PAM sequence: TTC
  source 1..20: mol_type = other DNA
gagaagctgaggcacgtggt

SEQ ID NO: 33349 - DNA, 20 bp, synthetic construct
  misc_feature 1..20: note = Description of Artificial Sequence: Synthetic oligonucleotide
  misc_feature 1..20: note = Target: FXN; (+) strand; PAM type: YTN; PAM sequence: CTG
  source 1..20: mol_type = other DNA
aggcacgtggtggatcactt

SEQ ID NO: 33350 - DNA, 20 bp, synthetic construct
  misc_feature 1..20: note = Description of Artificial Sequence: Synthetic oligonucleotide
  misc_feature 1..20: note = Target: FXN; (+) strand; PAM type: YTN; PAM sequence: CTT
  source 1..20: mol_type = other DNA
gatgtcacgagttcagacca

SEQ ID NO: 33351 - DNA, 20 bp, synthetic construct
  misc_feature 1..20: note = Description of Artificial Sequence: Synthetic oligonucleotide
  misc_feature 1..20: note = Target: FXN; (+) strand; PAM type: YTN; PAM sequence: TTG
  source 1..20: mol_type = other DNA
atgtcacgagttcagaccag

SEQ ID NO: 33352 - DNA, 20 bp, synthetic construct
  misc_feature 1..20: note = Description of Artificial Sequence: Synthetic oligonucleotide
  misc_feature 1..20: note = Target: FXN; (+) strand; PAM type: YTN; PAM sequence: TTC
  source 1..20: mol_type = other DNA
agaccagccactgcactcca

SEQ ID NO: 33353 - DNA, 20 bp, synthetic construct
  misc_feature 1..20: note = Description of Artificial Sequence: Synthetic oligonucleotide
  misc_feature 1..20: note = Target: FXN; (+) strand; PAM type: YTN; PAM sequence: CTG
  source 1..20: mol_type = other DNA
cactccagcctgggtgacag

SEQ ID NO: 33354 - DNA, 20 bp, synthetic construct
  misc_feature 1..20: note = Description of Artificial Sequence: Synthetic oligonucleotide
  misc_feature 1..20: note = Target: FXN; (+) strand; PAM type: YTN; PAM sequence: CTC
  source 1..20: mol_type = other DNA
cagcctgggtgacagagtga

SEQ ID NO: 33355 - DNA, 20 bp, synthetic construct
  misc_feature 1..20: note = Description of Artificial Sequence: Synthetic oligonucleotide
  misc_feature 1..20: note = Target: FXN; (+) strand; PAM type: YTN; PAM sequence: CTG
  source 1..20: mol_type = other DNA
ggtgacagagtgagactctg

SEQ ID NO: 33356 - DNA, 20 bp, synthetic construct
  misc_feature 1..20: note = Description of Artificial Sequence: Synthetic oligonucleotide
  misc_feature 1..20: note = Target: FXN; (+) strand; PAM type: YTN; PAM sequence: CTC
  source 1..20: mol_type = other DNA
tgtctcaaaaaaaaaaaaaa

SEQ ID NO: 33357 - DNA, 20 bp, synthetic construct
  misc_feature 1..20: note = Description of Artificial Sequence: Synthetic oligonucleotide
  misc_feature 1..20: note = Target: FXN; (+) strand; PAM type: YTN; PAM sequence: CTG
  source 1..20: mol_type = other DNA
tctcaaaaaaaaaaaaaaaa

SEQ ID NO: 33358 - DNA, 20 bp, synthetic construct
  misc_feature 1..20: note = Description of Artificial Sequence: Synthetic oligonucleotide
  misc_feature 1..20: note = Target: FXN; (+) strand; PAM type: YTN; PAM sequence: CTC
  source 1..20: mol_type = other DNA
aaaaaaaaaaaaaaaagaaa

SEQ ID NO: 33359 - DNA, 20 bp, synthetic construct
  misc_feature 1..20: note = Description of Artificial Sequence: Synthetic oligonucleotide
  misc_feature 1..20: note = Target: FXN; (+) strand; PAM type: YTN; PAM sequence: CTT
  source 1..20: mol_type = other DNA
ttactttttacatgttattt

SEQ ID NO: 33360 - DNA, 20 bp, synthetic construct
  misc_feature 1..20: note = Description of Artificial Sequence: Synthetic oligonucleotide
  misc_feature 1..20: note = Target: FXN; (+) strand; PAM type: YTN; PAM sequence: TTT
  source 1..20: mol_type = other DNA
tactttttacatgttatttt

SEQ ID NO: 33361 - DNA, 20 bp, synthetic construct
  misc_feature 1..20: note = Description of Artificial Sequence: Synthetic oligonucleotide
  misc_feature 1..20: note = Target: FXN; (+) strand; PAM type: YTN; PAM sequence: TTT
  source 1..20: mol_type = other DNA
actttttacatgttattttc

SEQ ID NO: 33362 - DNA, 20 bp, synthetic construct
  misc_feature 1..20: note = Description of Artificial Sequence: Synthetic oligonucleotide
  misc_feature 1..20: note = Target: FXN; (+) strand; PAM type: YTN; PAM sequence: TTA
  source 1..20: mol_type = other DNA
ctttttacatgttattttca

SEQ ID NO: 33363 - DNA, 20 bp, synthetic construct
  misc_feature 1..20: note = Description of Artificial Sequence: Synthetic oligonucleotide
  misc_feature 1..20: note = Target: FXN; (+) strand; PAM type: YTN; PAM sequence: CTT
  source 1..20: mol_type = other DNA
tttacatgttattttcatca

SEQ ID NO: 33364 - DNA, 20 bp, synthetic construct
  misc_feature 1..20: note = Description of Artificial Sequence: Synthetic oligonucleotide
  misc_feature 1..20: note = Target: FXN; (+) strand; PAM type: YTN; PAM sequence: TTT
  source 1..20: mol_type = other DNA
ttacatgttattttcatcaa

SEQ ID NO: 33365 - DNA, 20 bp, synthetic construct
  misc_feature 1..20: note = Description of Artificial Sequence: Synthetic oligonucleotide
  misc_feature 1..20: note = Target: FXN; (+) strand; PAM type: YTN; PAM sequence: TTT
  source 1..20: mol_type = other DNA
tacatgttattttcatcaat

SEQ ID NO: 33366 - DNA, 20 bp, synthetic construct
  misc_feature 1..20: note = Description of Artificial Sequence: Synthetic oligonucleotide
  misc_feature 1..20: note = Target: FXN; (+) strand; PAM type: YTN; PAM sequence: TTT
  source 1..20: mol_type = other DNA
acatgttattttcatcaatt

SEQ ID NO: 33367 - DNA, 20 bp, synthetic construct
  misc_feature 1..20: note = Description of Artificial Sequence: Synthetic oligonucleotide
  misc_feature 1..20: note = Target: FXN; (+) strand; PAM type: YTN; PAM sequence: TTA
  source 1..20: mol_type = other DNA
catgttattttcatcaattt

SEQ ID NO: 33368 - DNA, 20 bp, synthetic construct
  misc_feature 1..20: note = Description of Artificial Sequence: Synthetic oligonucleotide
  misc_feature 1..20: note = Target: FXN; (+) strand; PAM type: YTN; PAM sequence: TTA
  source 1..20: mol_type = other DNA
ttttcatcaatttaatgaat

SEQ ID NO: 33369 - DNA, 20 bp, synthetic construct
  misc_feature 1..20: note = Description of Artificial Sequence: Synthetic oligonucleotide
  misc_feature 1..20: note = Target: FXN; (+) strand; PAM type: YTN; PAM sequence: TTT
  source 1..20: mol_type = other DNA
tcatcaatttaatgaattta

SEQ ID NO: 33370 - DNA, 20 bp, synthetic construct
  misc_feature 1..20: note = Description of Artificial Sequence: Synthetic oligonucleotide
  misc_feature 1..20: note = Target: FXN; (+) strand; PAM type: YTN; PAM sequence: TTT
  source 1..20: mol_type = other DNA
catcaatttaatgaatttaa

SEQ ID NO: 33371 - DNA, 20 bp, synthetic construct
  misc_feature 1..20: note = Description of Artificial Sequence: Synthetic oligonucleotide
  misc_feature 1..20: note = Target: FXN; (+) strand; PAM type: YTN; PAM sequence: TTC
  source 1..20: mol_type = other DNA
atcaatttaatgaatttaaa

SEQ ID NO: 33372 - DNA, 20 bp, synthetic construct
  misc_feature 1..20: note = Description of Artificial Sequence: Synthetic oligonucleotide
  misc_feature 1..20: note = Target: FXN; (+) strand; PAM type: YTN; PAM sequence: TTT
  source 1..20: mol_type = other DNA
aatgaatttaaataacaaat

SEQ ID NO: 33373 - DNA, 20 bp, synthetic construct
  misc_feature 1..20: note = Description of Artificial Sequence: Synthetic oligonucleotide
  misc_feature 1..20: note = Target: FXN; (+) strand; PAM type: YTN; PAM sequence: TTA
  source 1..20: mol_type = other DNA
atgaatttaaataacaaatg

SEQ ID NO: 33374 - DNA, 20 bp, synthetic construct
  misc_feature 1..20: note = Description of Artificial Sequence: Synthetic oligonucleotide
  misc_feature 1..20: note = Target: FXN; (+) strand; PAM type: YTN; PAM sequence: TTT
  source 1..20: mol_type = other DNA
aaataacaaatgtataaatt

SEQ ID NO: 33375 - DNA, 20 bp, synthetic construct
  misc_feature 1..20: note = Description of Artificial Sequence: Synthetic oligonucleotide
  misc_feature 1..20: note = Target: FXN; (+) strand; PAM type: YTN; PAM sequence: TTA
  source 1..20: mol_type = other DNA
aataacaaatgtataaattt

SEQ ID NO: 33376 - DNA, 20 bp, synthetic construct
  misc_feature 1..20: note = Description of Artificial Sequence: Synthetic oligonucleotide
  misc_feature 1..20: note = Target: FXN; (+) strand; PAM type: YTN; PAM sequence: TTT
  source 1..20: mol_type = other DNA
gatattaataaaatggaagc

SEQ ID NO: 33377 - DNA, 20 bp, synthetic construct
  misc_feature 1..20: note = Description of Artificial Sequence: Synthetic oligonucleotide
  misc_feature 1..20: note = Target: FXN; (+) strand; PAM type: YTN; PAM sequence: TTG
  source 1..20: mol_type = other DNA
atattaataaaatggaagca

SEQ ID NO: 33378 - DNA, 20 bp, synthetic construct
  misc_feature 1..20: note = Description of Artificial Sequence: Synthetic oligonucleotide
  misc_feature 1..20: note = Target: FXN; (+) strand; PAM type: YTN; PAM sequence: TTA
  source 1..20: mol_type = other DNA
ataaaatggaagcatttggt

SEQ ID NO: 33379 - DNA, 20 bp, synthetic construct
  misc_feature 1..20: note = Description of Artificial Sequence: Synthetic oligonucleotide
  misc_feature 1..20: note = Target: FXN; (+) strand; PAM type: YTN; PAM sequence: TTT
  source 1..20: mol_type = other DNA
ggtaatcatgttttgggttt

SEQ ID NO: 33380 - DNA, 20 bp, synthetic construct
  misc_feature 1..20: note = Description of Artificial Sequence: Synthetic oligonucleotide
  misc_feature 1..20: note = Target: FXN; (+) strand; PAM type: YTN; PAM sequence: TTG
  source 1..20: mol_type = other DNA
gtaatcatgttttgggtttt

SEQ ID NO: 33381 - DNA, 20 bp, synthetic construct
  misc_feature 1..20: note = Description of Artificial Sequence: Synthetic oligonucleotide
  misc_feature 1..20: note = Target: FXN; (+) strand; PAM type: YTN; PAM sequence: TTT
  source 1..20: mol_type = other DNA
tgggttttgtgcttcctctg

SEQ ID NO: 33382 - DNA, 20 bp, synthetic construct
  misc_feature 1..20: note = Description of Artificial Sequence: Synthetic oligonucleotide
  misc_feature 1..20: note = Target: FXN; (+) strand; PAM type: YTN; PAM sequence: TTT
  source 1..20: mol_type = other DNA
gggttttgtgcttcctctgc

SEQ ID NO: 33383 - DNA, 20 bp, synthetic construct
  misc_feature 1..20: note = Description of Artificial Sequence: Synthetic oligonucleotide
  misc_feature 1..20: note = Target: FXN; (+) strand; PAM type: YTN; PAM sequence: TTG
  source 1..20: mol_type = other DNA
ggttttgtgcttcctctgca

SEQ ID NO: 33384 - DNA, 20 bp, synthetic construct
  misc_feature 1..20: note = Description of Artificial Sequence: Synthetic oligonucleotide
  misc_feature 1..20: note = Target: FXN; (+) strand; PAM type: YTN; PAM sequence: TTT
  source 1..20: mol_type = other DNA
tgtgcttcctctgcagctct

SEQ ID NO: 33385 - DNA, 20 bp, synthetic construct
  misc_feature 1..20: note = Description of Artificial Sequence: Synthetic oligonucleotide
  misc_feature 1..20: note = Target: FXN; (+) strand; PAM type: YTN; PAM sequence: TTT
  source 1..20: mol_type = other DNA
gtgcttcctctgcagctctc

SEQ ID NO: 33386 - DNA, 20 bp, synthetic construct
  misc_feature 1..20: note = Description of Artificial Sequence: Synthetic oligonucleotide
  misc_feature 1..20: note = Target: FXN; (+) strand; PAM type: YTN; PAM sequence: TTG
  source 1..20: mol_type = other DNA
tgcttcctctgcagctctct

SEQ ID NO: 33387 - DNA, 20 bp, synthetic construct
  misc_feature 1..20: note = Description of Artificial Sequence: Synthetic oligonucleotide
  misc_feature 1..20: note = Target: FXN; (+) strand; PAM type: YTN; PAM sequence: CTT
  source 1..20: mol_type = other DNA
cctctgcagctctctagatg

SEQ ID NO: 33388 - DNA, 20 bp, synthetic construct
  misc_feature 1..20: note = Description of Artificial Sequence: Synthetic oligonucleotide
  misc_feature 1..20: note = Target: FXN; (+) strand; PAM type: YTN; PAM sequence: TTC
  source 1..20: mol_type = other DNA
ctctgcagctctctagatga

SEQ ID NO: 33389 - DNA, 20 bp, synthetic construct
  misc_feature 1..20: note = Description of Artificial Sequence: Synthetic oligonucleotide
  misc_feature 1..20: note = Target: FXN; (+) strand; PAM type: YTN; PAM sequence: CTC
  source 1..20: mol_type = other DNA
tgcagctctctagatgagac

SEQ ID NO: 33390 - DNA, 20 bp, synthetic construct
  misc_feature 1..20: note = Description of Artificial Sequence: Synthetic oligonucleotide
  misc_feature 1..20: note = Target: FXN; (+) strand; PAM type: YTN; PAM sequence: CTG
  source 1..20: mol_type = other DNA
cagctctctagatgagacca

SEQ ID NO: 33391 - DNA, 20 bp, synthetic construct
  misc_feature 1..20: note = Description of Artificial Sequence: Synthetic oligonucleotide
  misc_feature 1..20: note = Target: FXN; (+) strand; PAM type: YTN; PAM sequence: CTC
  source 1..20: mol_type = other DNA
tctagatgagaccacctatg

SEQ ID NO: 33392 - DNA, 20 bp, synthetic construct
  misc_feature 1..20: note = Description of Artificial Sequence: Synthetic oligonucleotide
  misc_feature 1..20: note = Target: FXN; (+) strand; PAM type: YTN; PAM sequence: CTC
  source 1..20: mol_type = other DNA
tagatgagaccacctatgaa

SEQ ID NO: 33393 - DNA, 20 bp, synthetic construct
  misc_feature 1..20: note = Description of Artificial Sequence: Synthetic oligonucleotide
  misc_feature 1..20: note = Target: FXN; (+) strand; PAM type: YTN; PAM sequence: CTA
  source 1..20: mol_type = other DNA
gatgagaccacctatgaaag

SEQ ID NO: 33394 - DNA, 20 bp, synthetic construct
  misc_feature 1..20: note = Description of Artificial Sequence: Synthetic oligonucleotide
  misc_feature 1..20: note = Target: FXN; (+) strand; PAM type: YTN; PAM sequence: CTA
  source 1..20: mol_type = other DNA
tgaaagactagcagaggaaa

SEQ ID NO: 33395 - DNA, 20 bp, synthetic construct
  misc_feature 1..20: note = Description of Artificial Sequence: Synthetic oligonucleotide
  misc_feature 1..20: note = Target: FXN; (+) strand; PAM type: YTN; PAM sequence: CTA
  source 1..20: mol_type = other DNA
gcagaggaaacgctggactc

SEQ ID NO: 33396 - DNA, 20 bp, synthetic construct
  misc_feature 1..20: note = Description of Artificial Sequence: Synthetic oligonucleotide
  misc_feature 1..20: note = Target: FXN; (+) strand; PAM type: YTN; PAM sequence: CTG
  source 1..20: mol_type = other DNA
gactctttagcagagttttt

SEQ ID NO: 33397 - DNA, 20 bp, synthetic construct
  misc_feature 1..20: note = Description of Artificial Sequence: Synthetic oligonucleotide
  misc_feature 1..20: note = Target: FXN; (+) strand; PAM type: YTN; PAM sequence: CTC
  source 1..20: mol_type = other DNA
tttagcagagttttttgaag

SEQ ID NO: 33398 - DNA, 20 bp, synthetic construct
  misc_feature 1..20: note = Description of Artificial Sequence: Synthetic oligonucleotide
  misc_feature 1..20: note = Target: FXN; (+) strand; PAM type: YTN; PAM sequence: CTT
  source 1..20: mol_type = other DNA
tagcagagttttttgaagac

SEQ ID NO: 33399 - DNA, 20 bp, synthetic construct
  misc_feature 1..20: note = Description of Artificial Sequence: Synthetic oligonucleotide
  misc_feature 1..20: note = Target: FXN; (+) strand; PAM type: YTN; PAM sequence: TTT
  source 1..20: mol_type = other DNA
agcagagttttttgaagacc

SEQ ID NO: 33400 - DNA, 20 bp, synthetic construct
  misc_feature 1..20: note = Description of Artificial Sequence: Synthetic oligonucleotide
  misc_feature 1..20: note = Target: FXN; (+) strand; PAM type: YTN; PAM sequence: TTA
  source 1..20: mol_type = other DNA
gcagagttttttgaagacct

SEQ ID NO: 33401 - DNA, 20 bp, synthetic construct
  misc_feature 1..20: note = Description of Artificial Sequence: Synthetic oligonucleotide
  misc_feature 1..20: note = Target: FXN; (+) strand; PAM type: YTN; PAM sequence: TTT
  source 1..20: mol_type = other DNA
tttgaagaccttgcagacaa

SEQ ID NO: 33402 - DNA, 20 bp, synthetic construct
  misc_feature 1..20: note = Description of Artificial Sequence: Synthetic oligonucleotide
  misc_feature 1..20: note = Target: FXN; (+) strand; PAM type: YTN; PAM sequence: TTT
  source 1..20: mol_type = other DNA
ttgaagaccttgcagacaag

SEQ ID NO: 33403 - DNA, 20 bp, synthetic construct
  misc_feature 1..20: note = Description of Artificial Sequence: Synthetic oligonucleotide
  misc_feature 1..20: note = Target: FXN; (+) strand; PAM type: YTN; PAM sequence: TTT
  source 1..20: mol_type = other DNA
tgaagaccttgcagacaagc

SEQ ID NO: 33404 - DNA, 20 bp, synthetic construct
  misc_feature 1..20: note = Description of Artificial Sequence: Synthetic oligonucleotide
  misc_feature 1..20: note = Target: FXN; (+) strand; PAM type: YTN; PAM sequence: TTT
  source 1..20: mol_type = other DNA
gaagaccttgcagacaagcc

SEQ ID NO: 33405 - DNA, 20 bp, synthetic construct
  misc_feature 1..20: note = Description of Artificial Sequence: Synthetic oligonucleotide
  misc_feature 1..20: note = Target: FXN; (+) strand; PAM type: YTN; PAM sequence: TTG
  source 1..20: mol_type = other DNA
aagaccttgcagacaagcca

SEQ ID NO: 33406 - DNA, 20 bp, synthetic construct
  misc_feature 1..20: note = Description of Artificial Sequence: Synthetic oligonucleotide
  misc_feature 1..20: note = Target: FXN; (+) strand; PAM type: YTN; PAM sequence: CTT
  source 1..20: mol_type = other DNA
gcagacaagccatacacgtt

SEQ ID NO: 33407 - DNA, 20 bp, synthetic construct
  misc_feature 1..20: note = Description of Artificial Sequence: Synthetic oligonucleotide
  misc_feature 1..20: note = Target: FXN; (+) strand; PAM type: YTN; PAM sequence: TTG
  source 1..20: mol_type = other DNA
cagacaagccatacacgttt

SEQ ID NO: 33408 - DNA, 20 bp, synthetic construct
  misc_feature 1..20: note = Description of Artificial Sequence: Synthetic oligonucleotide
  misc_feature 1..20: note = Target: FXN; (+) strand; PAM type: YTN; PAM sequence: TTT
  source 1..20: mol_type = other DNA
gaggactatgatgtctcctt

SEQ ID NO: 33409 - DNA, 20 bp, synthetic construct
  misc_feature 1..20: note = Description of Artificial Sequence: Synthetic oligonucleotide
  misc_feature 1..20: note = Target: FXN; (+) strand; PAM type: YTN; PAM sequence: TTG
  source 1..20: mol_type = other DNA
aggactatgatgtctccttt

SEQ ID NO: 33410 - DNA, 20 bp, synthetic construct
  misc_feature 1..20: note = Description of Artificial Sequence: Synthetic oligonucleotide
  misc_feature 1..20: note = Target: FXN; (+) strand; PAM type: YTN; PAM sequence: CTA
  source 1..20: mol_type = other DNA
tgatgtctcctttggggtac

SEQ ID NO: 33411 - DNA, 20 bp, synthetic construct
  misc_feature 1..20: note = Description of Artificial Sequence: Synthetic oligonucleotide
  misc_feature 1..20: note = Target: FXN; (+) strand; PAM type: YTN; PAM sequence: CTC
  source 1..20: mol_type = other DNA
ctttggggtacctcttgact

SEQ ID NO: 33412 - DNA, 20 bp, synthetic construct
  misc_feature 1..20: note = Description of Artificial Sequence: Synthetic oligonucleotide
  misc_feature 1..20: note = Target: FXN; (+) strand; PAM type: YTN; PAM sequence: CTT
  source 1..20: mol_type = other DNA
tggggtacctcttgacttct

SEQ ID NO: 33413 - DNA, 20 bp, synthetic construct
  misc_feature 1..20: note = Description of Artificial Sequence: Synthetic oligonucleotide
  misc_feature 1..20: note = Target: FXN; (+) strand; PAM type: YTN; PAM sequence: TTT
  source 1..20: mol_type = other DNA
ggggtacctcttgacttctt

SEQ ID NO: 33414 - DNA, 20 bp, synthetic construct
  misc_feature 1..20: note = Description of Artificial Sequence: Synthetic oligonucleotide
  misc_feature 1..20: note = Target: FXN; (+) strand; PAM type: YTN; PAM sequence: TTG
  source 1..20: mol_type = other DNA
gggtacctcttgacttcttt

SEQ ID NO: 33415 - DNA, 20 bp, synthetic construct
  misc_feature 1..20: note = Description of Artificial Sequence: Synthetic oligonucleotide
  misc_feature 1..20: note = Target: FXN; (+) strand; PAM type: YTN; PAM sequence: CTC
  source 1..20: mol_type = other DNA
ttgacttcttttatttttct

SEQ ID NO: 33416 - DNA, 20 bp, synthetic construct
  misc_feature 1..20: note = Description of Artificial Sequence: Synthetic oligonucleotide
  misc_feature 1..20: note = Target: FXN; (+) strand; PAM type: YTN; PAM sequence: CTT
  source 1..20: mol_type = other DNA
gacttcttttatttttctgt

SEQ ID NO: 33417 - DNA, 20 bp, synthetic construct
  misc_feature 1..20: note = Description of Artificial Sequence: Synthetic oligonucleotide
  misc_feature 1..20: note = Target: FXN; (+) strand; PAM type: YTN; PAM sequence: TTG
  source 1..20: mol_type = other DNA
acttcttttatttttctgtt

SEQ ID NO: 33418 - DNA, 20 bp, synthetic construct
  misc_feature 1..20: note = Description of Artificial Sequence: Synthetic oligonucleotide
  misc_feature 1..20: note = Target: FXN; (+) strand; PAM type: YTN; PAM sequence: CTT
  source 1..20: mol_type = other DNA
cttttatttttctgtttccc

SEQ ID NO: 33419 - DNA, 20 bp, synthetic construct
  misc_feature 1..20: note = Description of Artificial Sequence: Synthetic oligonucleotide
  misc_feature 1..20: note = Target: FXN; (+) strand; PAM type: YTN; PAM sequence: TTC
  source 1..20: mol_type = other DNA
ttttatttttctgtttcccc

SEQ ID NO: 33420 - DNA, 20 bp, synthetic construct
  misc_feature 1..20: note = Description of Artificial Sequence: Synthetic oligonucleotide
  misc_feature 1..20: note = Target: FXN; (+) strand; PAM type: YTN; PAM sequence: CTT
  source 1..20: mol_type = other DNA
ttatttttctgtttccccct

SEQ ID NO: 33421 - DNA, 20 bp, synthetic construct
  misc_feature 1..20: note = Description of Artificial Sequence: Synthetic oligonucleotide
  misc_feature 1..20: note = Target: FXN; (+) strand; PAM type: YTN; PAM sequence: TTT
  source 1..20: mol_type = other DNA
tatttttctgtttccccctc

SEQ ID NO: 33422 - DNA, 20 bp, synthetic construct
  misc_feature 1..20: note = Description of Artificial Sequence: Synthetic oligonucleotide
  misc_feature 1..20: note = Target: FXN; (+) strand; PAM type: YTN; PAM sequence: TTT
  source 1..20: mol_type = other DNA
atttttctgtttccccctct

SEQ ID NO: 33423 - DNA, 20 bp, synthetic construct
  misc_feature 1..20: note = Description of Artificial Sequence: Synthetic oligonucleotide
  misc_feature 1..20: note = Target: FXN; (+) strand; PAM type: YTN; PAM sequence: TTA
  source 1..20: mol_type = other DNA
tttttctgtttccccctcta

SEQ ID NO: 33424 - DNA, 20 bp, synthetic construct
  misc_feature 1..20: note = Description of Artificial Sequence: Synthetic oligonucleotide
  misc_feature 1..20: note = Target: FXN; (+) strand; PAM type: YTN; PAM sequence: TTT
  source 1..20: mol_type = other DNA
ttctgtttccccctctaaga

SEQ ID NO: 33425 - DNA, 20 bp, synthetic construct
  misc_feature 1..20: note = Description of Artificial Sequence: Synthetic oligonucleotide
  misc_feature 1..20: note = Target: FXN; (+) strand; PAM type: YTN; PAM sequence: TTT
  source 1..20: mol_type = other DNA
tctgtttccccctctaagaa

SEQ ID NO: 33426 - DNA, 20 bp, synthetic construct
  misc_feature 1..20: note = Description of Artificial Sequence: Synthetic oligonucleotide
  misc_feature 1..20: note = Target: FXN; (+) strand; PAM type: YTN; PAM sequence: TTT
  source 1..20: mol_type = other DNA
ctgtttccccctctaagaat

SEQ ID NO: 33427 - DNA, 20 bp, synthetic construct
  misc_feature 1..20: note = Description of Artificial Sequence: Synthetic oligonucleotide
  misc_feature 1..20: note = Target: FXN; (+) strand; PAM type: YTN; PAM sequence: TTC
  source 1..20: mol_type = other DNA
tgtttccccctctaagaatt

SEQ ID NO: 33428 - DNA, 20 bp, synthetic construct
  misc_feature 1..20: note = Description of Artificial Sequence: Synthetic oligonucleotide
  misc_feature 1..20: note = Target: FXN; (+) strand; PAM type: YTN; PAM sequence: CTG
  source 1..20: mol_type = other DNA
tttccccctctaagaatttt

SEQ ID NO: 33429 - DNA, 20 bp, synthetic construct
  misc_feature 1..20: note = Description of Artificial Sequence: Synthetic oligonucleotide
  misc_feature 1..20: note = Target: FXN; (+) strand; PAM type: YTN; PAM sequence: TTT
  source 1..20: mol_type = other DNA
ccccctctaagaattttagt

SEQ ID NO: 33430 - DNA, 20 bp, synthetic construct
  misc_feature 1..20: note = Description of Artificial Sequence: Synthetic oligonucleotide
  misc_feature 1..20: note = Target: FXN; (+) strand; PAM type: YTN; PAM sequence: TTC
  source 1..20: mol_type = other DNA
cccctctaagaattttagtt

SEQ ID NO: 33431 - DNA, 20 bp, synthetic construct
  misc_feature 1..20: note = Description of Artificial Sequence: Synthetic oligonucleotide
  misc_feature 1..20: note = Target: FXN; (+) strand; PAM type: YTN; PAM sequence: CTC
  source 1..20: mol_type = other DNA
taagaattttagttcactaa

SEQ ID NO: 33432 - DNA, 20 bp, synthetic construct
  misc_feature 1..20: note = Description of Artificial Sequence: Synthetic oligonucleotide
  misc_feature 1..20: note = Target: FXN; (+) strand; PAM type: YTN; PAM sequence: CTA
  source 1..20: mol_type = other DNA
agaattttagttcactaaaa

SEQ ID NO: 33433 - DNA, 20 bp, synthetic construct
  misc_feature 1..20: note = Description of Artificial Sequence: Synthetic oligonucleotide
  misc_feature 1..20: note = Target: FXN; (+) strand; PAM type: YTN; PAM sequence: TTT
  source 1..20: mol_type = other DNA
tagttcactaaaatgaagaa

SEQ ID NO: 33434 - DNA, 20 bp, synthetic construct
  misc_feature 1..20: note = Description of Artificial Sequence: Synthetic oligonucleotide
  misc_feature 1..20: note = Target: FXN; (+) strand; PAM type: YTN; PAM sequence: TTT
  source 1..20: mol_type = other DNA
agttcactaaaatgaagaat

SEQ ID NO: 33435 - DNA, 20 bp, synthetic construct
  misc_feature 1..20: note = Description of Artificial Sequence: Synthetic oligonucleotide
  misc_feature 1..20: note = Target: FXN; (+) strand; PAM type: YTN; PAM sequence: TTA
  source 1..20: mol_type = other DNA
gttcactaaaatgaagaatt

SEQ ID NO: 33436 - DNA, 20 bp, synthetic construct
  misc_feature 1..20: note = Description of Artificial Sequence: Synthetic oligonucleotide
  misc_feature 1..20: note = Target: FXN; (+) strand; PAM type: YTN; PAM sequence: TTC
  source 1..20: mol_type = other DNA
actaaaatgaagaatttccc

SEQ ID NO: 33437 - DNA, 20 bp, synthetic construct
  misc_feature 1..20: note = Description of Artificial Sequence: Synthetic oligonucleotide
  misc_feature 1..20: note = Target: FXN; (+) strand; PAM type: YTN; PAM sequence: CTA
  source 1..20: mol_type = other DNA
aaatgaagaatttccctcca

SEQ ID NO: 33438 - DNA, 20 bp, synthetic construct
  misc_feature 1..20: note = Description of Artificial Sequence: Synthetic oligonucleotide
  misc_feature 1..20: note = Target: FXN; (+) strand; PAM type: YTN; PAM sequence: TTT
  source 1..20: mol_type = other DNA
ccctccagcagagctaagca

SEQ ID NO: 33439 - DNA, 20 bp, synthetic construct
  misc_feature 1..20: note = Description of Artificial Sequence: Synthetic oligonucleotide
  misc_feature 1..20: note = Target: FXN; (+) strand; PAM type: YTN; PAM sequence: TTC
  source 1..20: mol_type = other DNA
cctccagcagagctaagcat

SEQ ID NO: 33440 - DNA, 20 bp, synthetic construct
  misc_feature 1..20: note = Description of Artificial Sequence: Synthetic oligonucleotide
  misc_feature 1..20: note = Target: FXN; (+) strand; PAM type: YTN; PAM sequence: CTC
  source 1..20: mol_type = other DNA
cagcagagctaagcatcaag

SEQ ID NO: 33441 - DNA, 20 bp, synthetic construct
  misc_feature 1..20: note = Description of Artificial Sequence: Synthetic oligonucleotide
  misc_feature 1..20: note = Target: FXN; (+) strand; PAM type: YTN; PAM sequence: CTA
  source 1..20: mol_type = other DNA
agcatcaagtagcatgtagt

SEQ ID NO: 33442 - DNA, 20 bp, synthetic construct
  misc_feature 1..20: note = Description of Artificial Sequence: Synthetic oligonucleotide
  misc_feature 1..20: note = Target: FXN; (+) strand; PAM type: YTN; PAM sequence: TTG
  source 1..20: mol_type = other DNA
taggtaggattaaaagacta

SEQ ID NO: 33443 - DNA, 20 bp, synthetic construct
  misc_feature 1..20: note = Description of Artificial Sequence: Synthetic oligonucleotide
  misc_feature 1..20: note = Target: FXN; (+) strand; PAM type: YTN; PAM sequence: TTA
  source 1..20: mol_type = other DNA
aaagactagggttccgggag

SEQ ID NO: 33444 - DNA, 20 bp, synthetic construct
  misc_feature 1..20: note = Description of Artificial Sequence: Synthetic oligonucleotide
  misc_feature 1..20: note = Target: FXN; (+) strand; PAM type: YTN; PAM sequence: CTA
  source 1..20: mol_type = other DNA
gggttccgggaggtgaaggt

SEQ ID NO: 33445 - DNA, 20 bp, synthetic construct
  misc_feature 1..20: note = Description of Artificial Sequence: Synthetic oligonucleotide
  misc_feature 1..20: note = Target: FXN; (+) strand; PAM type: YTN; PAM sequence: TTC
  source 1..20: mol_type = other DNA
cgggaggtgaaggttgcagt

SEQ ID NO: 33446 - DNA, 20 bp, synthetic construct
  misc_feature 1..20: note = Description of Artificial Sequence: Synthetic oligonucleotide
  misc_feature 1..20: note = Target: FXN; (+) strand; PAM type: YTN; PAM sequence: TTG
  source 1..20: mol_type = other DNA
cagtgagccaaaatcacgcc

SEQ ID NO: 33447 - DNA, 20 bp, synthetic construct
  misc_feature 1..20: note = Description of Artificial Sequence: Synthetic oligonucleotide
  misc_feature 1..20: note = Target: FXN; (+) strand; PAM type: YTN; PAM sequence: CTG
  source 1..20: mol_type = other DNA
cactccagcctgggtgacag

SEQ ID NO: 33448 - DNA, 20 bp, synthetic construct
  misc_feature 1..20: note = Description of Artificial Sequence: Synthetic oligonucleotide
  misc_feature 1..20: note = Target: FXN; (+) strand; PAM type: YTN; PAM sequence: CTC
  source 1..20: mol_type = other DNA
cagcctgggtgacagagcga

SEQ ID NO: 33449 - DNA, 20 bp, synthetic construct
  misc_feature 1..20: note = Description of Artificial Sequence: Synthetic oligonucleotide
  misc_feature 1..20: note = Target: FXN; (+) strand; PAM type: YTN; PAM sequence: CTG
  source 1..20: mol_type = other DNA
ggtgacagagcgagactctg

SEQ ID NO: 33450 - DNA, 20 bp, synthetic construct
  misc_feature 1..20: note = Description of Artificial Sequence: Synthetic oligonucleotide
  misc_feature 1..20: note = Target: FXN; (+) strand; PAM type: YTN; PAM sequence: CTC
  source 1..20: mol_type = other DNA
tgtcatagatggatggatgg

SEQ ID NO: 33451 - DNA, 20 bp, synthetic construct
  misc_feature 1..20: note = Description of Artificial Sequence: Synthetic oligonucleotide
  misc_feature 1..20: note = Target: FXN; (+) strand; PAM type: YTN; PAM sequence: CTG
  source 1..20: mol_type = other DNA
tcatagatggatggatggat

SEQ ID NO: 33452 - DNA, 20 bp, synthetic construct
  misc_feature 1..20: note = Description of Artificial Sequence: Synthetic oligonucleotide
  misc_feature 1..20: note = Target: FXN; (+) strand; PAM type: YTN; PAM sequence: CTG
  source 1..20: mol_type = other DNA
gatagatagataagatagat

SEQ ID NO: 33453 - DNA, 20 bp, synthetic construct
  misc_feature 1..20: note = Description of Artificial Sequence: Synthetic oligonucleotide
  misc_feature 1..20: note = Target: FXN; (+) strand; PAM type: YTN; PAM sequence: CTA
  source 1..20: mol_type = other DNA
ggcttcaagctgcagtccag

SEQ ID NO: 33454 - DNA, 20 bp, synthetic construct
  misc_feature 1..20: note = Description of Artificial Sequence: Synthetic oligonucleotide
  misc_feature 1..20: note = Target: FXN; (+) strand; PAM type: YTN; PAM sequence: CTT
  source 1..20: mol_type = other DNA
caagctgcagtccagctcta

SEQ ID NO: 33455 - DNA, 20 bp, synthetic construct
  misc_feature 1..20: note = Description of Artificial Sequence: Synthetic oligonucleotide
  misc_feature 1..20: note = Target: FXN; (+) strand; PAM type: YTN; PAM sequence: TTC
  source 1..20: mol_type = other DNA
aagctgcagtccagctctac

SEQ ID NO: 33456 - DNA, 20 bp, synthetic construct
  misc_feature 1..20: note = Description of Artificial Sequence: Synthetic oligonucleotide
  misc_feature 1..20: note = Target: FXN; (+) strand; PAM type: YTN; PAM sequence: CTG
  source 1..20: mol_type = other DNA
cagtccagctctaccaggct

SEQ ID NO: 33457 - DNA, 20 bp, synthetic construct
  misc_feature 1..20: note = Description of Artificial Sequence: Synthetic oligonucleotide
  misc_feature 1..20: note = Target: FXN; (+) strand; PAM type: YTN; PAM sequence: CTC
  source 1..20: mol_type = other DNA
taccaggcttgttgtgactc

SEQ ID NO: 33458 - DNA, 20 bp, synthetic construct
  misc_feature 1..20: note = Description of Artificial Sequence: Synthetic oligonucleotide
  misc_feature 1..20: note = Target: FXN; (+) strand; PAM type: YTN; PAM sequence: CTA
  source 1..20: mol_type = other DNA
ccaggcttgttgtgactctg

SEQ ID NO: 33459 - DNA, 20 bp, synthetic construct
  misc_feature 1..20: note = Description of Artificial Sequence: Synthetic oligonucleotide
  misc_feature 1..20: note = Target: FXN; (+) strand; PAM type: YTN; PAM sequence: CTT
  source 1..20: mol_type = other DNA
gttgtgactctgggcaagtc

SEQ ID NO: 33460 - DNA, 20 bp, synthetic construct
  misc_feature 1..20: note = Description of Artificial Sequence: Synthetic oligonucleotide
  misc_feature 1..20: note = Target: FXN; (+) strand; PAM type: YTN; PAM sequence: TTG
  source 1..20: mol_type = other DNA
ttgtgactctgggcaagtca

SEQ ID NO: 33461 - DNA, 20 bp, synthetic construct
  misc_feature 1..20: note = Description of Artificial Sequence: Synthetic oligonucleotide
  misc_feature 1..20: note = Target: FXN; (+) strand; PAM type: YTN; PAM sequence: TTG
  source 1..20: mol_type = other DNA
tgactctgggcaagtcactc

SEQ ID NO: 33462 - DNA, 20 bp, synthetic construct
  misc_feature 1..20: note = Description of Artificial Sequence: Synthetic oligonucleotide
  misc_feature 1..20: note = Target: FXN; (+) strand; PAM type: YTN; PAM sequence: CTC
  source 1..20: mol_type = other DNA
tgggcaagtcactcagcctc

SEQ ID NO: 33463 - DNA, 20 bp, synthetic construct
  misc_feature 1..20: note = Description of Artificial Sequence: Synthetic oligonucleotide
  misc_feature 1..20: note = Target: FXN; (+) strand; PAM type: YTN; PAM sequence: CTG
  source 1..20: mol_type = other DNA
ggcaagtcactcagcctctc

SEQ ID NO: 33464 - DNA, 20 bp, synthetic construct
  misc_feature 1..20: note = Description of Artificial Sequence: Synthetic oligonucleotide
  misc_feature 1..20: note = Target: FXN; (+) strand; PAM type: YTN; PAM sequence: CTC
  source 1..20: mol_type = other DNA
agcctctctgagcctcattt

SEQ ID NO: 33465 - DNA, 20 bp, synthetic construct
  misc_feature 1..20: note = Description of Artificial Sequence: Synthetic oligonucleotide
  misc_feature 1..20: note = Target: FXN; (+) strand; PAM type: YTN; PAM sequence: CTC
  source 1..20: mol_type = other DNA
tctgagcctcattttccagc

SEQ ID NO: 33466 - DNA, 20 bp, synthetic construct
  misc_feature 1..20: note = Description of Artificial Sequence: Synthetic oligonucleotide
  misc_feature 1..20: note = Target: FXN; (+) strand; PAM type: YTN; PAM sequence: CTC
  source 1..20: mol_type = other DNA
tgagcctcattttccagctt

SEQ ID NO: 33467 - DNA, 20 bp, synthetic construct
  misc_feature 1..20: note = Description of Artificial Sequence: Synthetic oligonucleotide
  misc_feature 1..20: note = Target: FXN; (+) strand; PAM type: YTN; PAM sequence: CTG
  source 1..20: mol_type = other DNA
agcctcattttccagcttca

SEQ ID NO: 33468 - DNA, 20 bp, synthetic construct
  misc_feature 1..20: note = Description of Artificial Sequence: Synthetic oligonucleotide
  misc_feature 1..20: note = Target: FXN; (+) strand; PAM type: YTN; PAM sequence: CTC
  source 1..20: mol_type = other DNA
attttccagcttcagtggat

SEQ ID NO: 33469 - DNA, 20 bp, synthetic construct
  misc_feature 1..20: note = Description of Artificial Sequence: Synthetic oligonucleotide
  misc_feature 1..20: note = Target: FXN; (+) strand; PAM type: YTN; PAM sequence: TTT
  source 1..20: mol_type = other DNA
tccagcttcagtggataccc

SEQ ID NO: 33470 - DNA, 20 bp, synthetic construct
  misc_feature 1..20: note = Description of Artificial Sequence: Synthetic oligonucleotide
  misc_feature 1..20: note = Target: FXN; (+) strand; PAM type: YTN; PAM sequence: TTT
  source 1..20: mol_type = other DNA
ccagcttcagtggataccca

SEQ ID NO: 33471 - DNA, 20 bp, synthetic construct
  misc_feature 1..20: note = Description of Artificial Sequence: Synthetic oligonucleotide
  misc_feature 1..20: note = Target: FXN; (+) strand; PAM type: YTN; PAM sequence: TTC
  source 1..20: mol_type = other DNA
cagcttcagtggatacccat

SEQ ID NO: 33472 - DNA, 20 bp, synthetic construct
  misc_feature 1..20: note = Description of Artificial Sequence: Synthetic oligonucleotide
  misc_feature 1..20: note = Target: FXN; (+) strand; PAM type: YTN; PAM sequence: CTT
  source 1..20: mol_type = other DNA
cagtggatacccatgaaggc

SEQ ID NO: 33473 - DNA, 20 bp, synthetic construct
  misc_feature 1..20: note = Description of Artificial Sequence: Synthetic oligonucleotide
  misc_feature 1..20: note = Target: FXN; (+) strand; PAM type: YTN; PAM sequence: TTC
  source 1..20: mol_type = other DNA
agtggatacccatgaaggca

SEQ ID NO: 33474 - DNA, 20 bp, synthetic construct
  misc_feature 1..20: note = Description of Artificial Sequence: Synthetic oligonucleotide
  misc_feature 1..20: note = Target: FXN; (+) strand; PAM type: YTN; PAM sequence: CTG
  source 1..20: mol_type = other DNA
agtgtgtatttgtccagcag

SEQ ID NO: 33475 - DNA, 20 bp, synthetic construct
  misc_feature 1..20: note = Description of Artificial Sequence: Synthetic oligonucleotide
  misc_feature 1..20: note = Target: FXN; (+) strand; PAM type: YTN; PAM sequence: TTT
  source 1..20: mol_type = other DNA
gtccagcaggcagatggagg

SEQ ID NO: 33476 - DNA, 20 bp, synthetic construct
  misc_feature 1..20: note = Description of Artificial Sequence: Synthetic oligonucleotide
  misc_feature 1..20: note = Target: FXN; (+) strand; PAM type: YTN; PAM sequence: TTG
  source 1..20: mol_type = other DNA
tccagcaggcagatggaggg

SEQ ID NO: 33477 - DNA, 20 bp, synthetic construct
  misc_feature 1..20: note = Description of Artificial Sequence: Synthetic oligonucleotide
  misc_feature 1..20: note = Target: FXN; (+) strand; PAM type: YTN; PAM sequence: CTA
  source 1..20: mol_type = other DNA
gacccgtagttcttcagtag

SEQ ID NO: 33478 - DNA, 20 bp, synthetic construct
  misc_feature 1..20: note = Description of Artificial Sequence: Synthetic oligonucleotide
  misc_feature 1..20: note = Target: FXN; (+) strand; PAM type: YTN; PAM sequence: TTC
  source 1..20: mol_type = other DNA
ttcagtagggataagataac

SEQ ID NO: 33479 - DNA, 20 bp, synthetic construct
  misc_feature 1..20: note = Description of Artificial Sequence: Synthetic oligonucleotide
  misc_feature 1..20: note = Target: FXN; (+) strand; PAM type: YTN; PAM sequence: CTT
  source 1..20: mol_type = other DNA
cagtagggataagataactg

SEQ ID NO: 33480 - DNA, 20 bp, synthetic construct
  misc_feature 1..20: note = Description of Artificial Sequence: Synthetic oligonucleotide
  misc_feature 1..20: note = Target: FXN; (+) strand; PAM type: YTN; PAM sequence: TTC
  source 1..20: mol_type = other DNA
agtagggataagataactgc

SEQ ID NO: 33481 - DNA, 20 bp, synthetic construct
  misc_feature 1..20: note = Description of Artificial Sequence: Synthetic oligonucleotide
  misc_feature 1..20: note = Target: FXN; (+) strand; PAM type: YTN; PAM sequence: CTG
  source 1..20: mol_type = other DNA
cccaaaagttatttagatta

SEQ ID NO: 33482 - DNA, 20 bp, synthetic construct
  misc_feature 1..20: note = Description of Artificial Sequence: Synthetic oligonucleotide
  misc_feature 1..20: note = Target: FXN; (+) strand; PAM type: YTN; PAM sequence: TTA
  source 1..20: mol_type = other DNA
tttagattacaaagacttga

SEQ ID NO: 33483 - DNA, 20 bp, synthetic construct
  misc_feature 1..20: note = Description of Artificial Sequence: Synthetic oligonucleotide
  misc_feature 1..20: note = Target: FXN; (+) strand; PAM type: YTN; PAM sequence: TTT
  source 1..20: mol_type = other DNA
agattacaaagacttgagcc

SEQ ID NO: 33484 - DNA, 20 bp, synthetic construct
  misc_feature 1..20: note = Description of Artificial Sequence: Synthetic oligonucleotide
  misc_feature 1..20: note = Target: FXN; (+) strand; PAM type: YTN; PAM sequence: TTA
  source 1..20: mol_type = other DNA
gattacaaagacttgagccc

SEQ ID NO: 33485 - DNA, 20 bp, synthetic construct
  misc_feature 1..20: note = Description of Artificial Sequence: Synthetic oligonucleotide
  misc_feature 1..20: note = Target: FXN; (+) strand; PAM type: YTN; PAM sequence: TTA
  source 1..20: mol_type = other DNA
caaagacttgagccctgctc

SEQ ID NO: 33486 - DNA, 20 bp, synthetic construct
  misc_feature 1..20: note = Description of Artificial Sequence: Synthetic oligonucleotide
  misc_feature 1..20: note = Target: FXN; (+) strand; PAM type: YTN; PAM sequence: CTT
  source 1..20: mol_type = other DNA
gagccctgctcctgtgagac

SEQ ID NO: 33487 - DNA, 20 bp, synthetic construct
  misc_feature 1..20: note = Description of Artificial Sequence: Synthetic oligonucleotide
  misc_feature 1..20: note = Target: FXN; (+) strand; PAM type: YTN; PAM sequence: TTG
  source 1..20: mol_type = other DNA
agccctgctcctgtgagaca

SEQ ID NO: 33488 - DNA, 20 bp, synthetic construct
  misc_feature 1..20: note = Description of Artificial Sequence: Synthetic oligonucleotide
  misc_feature 1..20: note = Target: FXN; (+) strand; PAM type: YTN; PAM sequence: CTG
  source 1..20: mol_type = other DNA
ctcctgtgagacagtgatgg

SEQ ID NO: 33489 - DNA, 20 bp, synthetic construct
  misc_feature 1..20: note = Description of Artificial Sequence: Synthetic oligonucleotide
  misc_feature 1..20: note = Target: FXN; (+) strand; PAM type: YTN; PAM sequence: CTC
  source 1..20: mol_type = other DNA
ctgtgagacagtgatggggt

SEQ ID NO: 33490 - DNA, 20 bp, synthetic construct
  misc_feature 1..20: note = Description of Artificial Sequence: Synthetic oligonucleotide
  misc_feature 1..20: note = Target: FXN; (+) strand; PAM type: YTN; PAM sequence: CTG
  source 1..20: mol_type = other DNA
tgagacagtgatggggtagg

SEQ ID NO: 33491 - DNA, 20 bp, synthetic construct
  misc_feature 1..20: note = Description of Artificial Sequence: Synthetic oligonucleotide
  misc_feature 1..20: note = Target: FXN; (+) strand; PAM type: YTN; PAM sequence: TTC
  source 1..20: mol_type = other DNA
ctgggaagcatatttttgaa

SEQ ID NO: 33492 - DNA, 20 bp, synthetic construct
  misc_feature 1..20: note = Description of Artificial Sequence: Synthetic oligonucleotide
  misc_feature 1..20: note = Target: FXN; (+) strand; PAM type: YTN; PAM sequence: CTG
  source 1..20: mol_type = other DNA
ggaagcatatttttgaaaag

SEQ ID NO: 33493 - DNA, 20 bp, synthetic construct
  misc_feature 1..20: note = Description of Artificial Sequence: Synthetic oligonucleotide
  misc_feature 1..20: note = Target: FXN; (+) strand; PAM type: YTN; PAM sequence: TTT
  source 1..20: mol_type = other DNA
ttgaaaagctcacctgggat

SEQ ID NO: 33494 - DNA, 20 bp, synthetic construct
  misc_feature 1..20: note = Description of Artificial Sequence: Synthetic oligonucleotide
  misc_feature 1..20: note = Target: FXN; (+) strand; PAM type: YTN; PAM sequence: TTT
  source 1..20: mol_type = other DNA
tgaaaagctcacctgggatt

SEQ ID NO: 33495 - DNA, 20 bp, synthetic construct
  misc_feature 1..20: note = Description of Artificial Sequence: Synthetic oligonucleotide
  misc_feature 1..20: note = Target: FXN; (+) strand; PAM type: YTN; PAM sequence: TTT
  source 1..20: mol_type = other DNA
gaaaagctcacctgggattc

SEQ ID NO: 33496 - DNA, 20 bp, synthetic construct
  misc_feature 1..20: note = Description of Artificial Sequence: Synthetic oligonucleotide
  misc_feature 1..20: note = Target: FXN; (+) strand; PAM type: YTN; PAM sequence: TTG
  source 1..20: mol_type = other DNA
aaaagctcacctgggattct

SEQ ID NO: 33497 - DNA, 20 bp, synthetic construct
  misc_feature 1..20: note = Description of Artificial Sequence: Synthetic oligonucleotide
  misc_feature 1..20: note = Target: FXN; (+) strand; PAM type: YTN; PAM sequence: CTC
  source 1..20: mol_type = other DNA
acctgggattctaatgtgta

SEQ ID NO: 33498 - DNA, 20 bp, synthetic construct
  misc_feature 1..20: note = Description of Artificial Sequence: Synthetic oligonucleotide
  misc_feature 1..20: note = Target: FXN; (+) strand; PAM type: YTN; PAM sequence: CTG
  source 1..20: mol_type = other DNA
ggattctaatgtgtatccct

SEQ ID NO: 33499 - DNA, 20 bp, synthetic construct
  misc_feature 1..20: note = Description of Artificial Sequence: Synthetic oligonucleotide
  misc_feature 1..20: note = Target: FXN; (+) strand; PAM type: YTN; PAM sequence: TTC
  source 1..20: mol_type = other DNA
taatgtgtatccctaggtct

SEQ ID NO: 33500 - DNA, 20 bp, synthetic construct
  misc_feature 1..20: note = Description of Artificial Sequence: Synthetic oligonucleotide
  misc_feature 1..20: note = Target: FXN; (+) strand; PAM type: YTN; PAM sequence: CTA
  source 1..20: mol_type = other DNA
atgtgtatccctaggtctta

SEQ ID NO: 33501 - DNA, 20 bp, synthetic construct
  misc_feature 1..20: note = Description of Artificial Sequence: Synthetic oligonucleotide
  misc_feature 1..20: note = Target: FXN; (+) strand; PAM type: YTN; PAM sequence: CTA
  source 1..20: mol_type = other DNA
ggtcttattcctagagattt

SEQ ID NO: 33502 - DNA, 20 bp, synthetic construct
  misc_feature 1..20: note = Description of Artificial Sequence: Synthetic oligonucleotide
  misc_feature 1..20: note = Target: FXN; (+) strand; PAM type: YTN; PAM sequence: CTT
  source 1..20: mol_type = other DNA
attcctagagattttgatta

SEQ ID NO: 33503 - DNA, 20 bp, synthetic construct
  misc_feature 1..20: note = Description of Artificial Sequence: Synthetic oligonucleotide
  misc_feature 1..20: note = Target: FXN; (+) strand; PAM type: YTN; PAM sequence: TTA
  source 1..20: mol_type = other DNA
ttcctagagattttgattac

SEQ ID NO: 33504 - DNA, 20 bp, synthetic construct
  misc_feature 1..20: note = Description of Artificial Sequence: Synthetic oligonucleotide
  misc_feature 1..20: note = Target: FXN; (+) strand; PAM type: YTN; PAM sequence: TTC
  source 1..20: mol_type = other DNA
ctagagattttgattacttg

SEQ ID NO: 33505 - DNA, 20 bp, synthetic construct
  misc_feature 1..20: note = Description of Artificial Sequence: Synthetic oligonucleotide
  misc_feature 1..20: note = Target: FXN; (+) strand; PAM type: YTN; PAM sequence: CTA
  source 1..20: mol_type = other DNA
gagattttgattacttggtc

SEQ ID NO: 33506 - DNA, 20 bp, synthetic construct
  misc_feature 1..20: note = Description of Artificial Sequence: Synthetic oligonucleotide
  misc_feature 1..20: note = Target: FXN; (+) strand; PAM type: YTN; PAM sequence: TTT
  source 1..20: mol_type = other DNA
tgattacttggtctggggtg

SEQ ID NO: 33507 - DNA, 20 bp, synthetic construct
  misc_feature 1..20: note = Description of Artificial Sequence: Synthetic oligonucleotide
  misc_feature 1..20: note = Target: FXN; (+) strand; PAM type: YTN; PAM sequence: TTT
  source 1..20: mol_type = other DNA
gattacttggtctggggtgt

SEQ ID NO: 33508 - DNA, 20 bp, synthetic construct
  misc_feature 1..20: note = Description of Artificial Sequence: Synthetic oligonucleotide
  misc_feature 1..20: note = Target: FXN; (+) strand; PAM type: YTN; PAM sequence: TTG
  source 1..20: mol_type = other DNA
attacttggtctggggtgtg

SEQ ID NO: 33509 - DNA, 20 bp, synthetic construct
  misc_feature 1..20: note = Description of Artificial Sequence: Synthetic oligonucleotide
  misc_feature 1..20: note = Target: FXN; (+) strand; PAM type: YTN; PAM sequence: TTA
  source 1..20: mol_type = other DNA
cttggtctggggtgtggcat

SEQ ID NO: 33510 - DNA, 20 bp, synthetic construct
  misc_feature 1..20: note = Description of Artificial Sequence: Synthetic oligonucleotide
  misc_feature 1..20: note = Target: FXN; (+) strand; PAM type: YTN; PAM sequence: CTT
  source 1..20: mol_type = other DNA
ggtctggggtgtggcatgac

SEQ ID NO: 33511 - DNA, 20 bp, synthetic construct
  misc_feature 1..20: note = Description of Artificial Sequence: Synthetic oligonucleotide
  misc_feature 1..20: note = Target: FXN; (+) strand; PAM type: YTN; PAM sequence: TTG
  source 1..20: mol_type = other DNA
gtctggggtgtggcatgacc

SEQ ID NO: 33512 - DNA, 20 bp, synthetic construct
  misc_feature 1..20: note = Description of Artificial Sequence: Synthetic oligonucleotide
  misc_feature 1..20: note = Target: FXN; (+) strand; PAM type: YTN; PAM sequence: CTG
  source 1..20: mol_type = other DNA
gggtgtggcatgacctgggc

SEQ ID NO: 33513 - DNA, 20 bp, synthetic construct
  misc_feature 1..20: note = Description of Artificial Sequence: Synthetic oligonucleotide
  misc_feature 1..20: note = Target: FXN; (+) strand; PAM type: YTN; PAM sequence: CTG
  source 1..20: mol_type = other DNA
ggcagggcactgggattttt

SEQ ID NO: 33514 - DNA, 20 bp, synthetic construct
  misc_feature 1..20: note = Description of Artificial Sequence: Synthetic oligonucleotide
  misc_feature 1..20: note = Target: FXN; (+) strand; PAM type: YTN; PAM sequence: CTG
  source 1..20: mol_type = other DNA
ggatttttaagctccacaga

SEQ ID NO: 33515 - DNA, 20 bp, synthetic construct
  misc_feature 1..20: note = Description of Artificial Sequence: Synthetic oligonucleotide
  misc_feature 1..20: note = Target: FXN; (+) strand; PAM type: YTN; PAM sequence: TTT
  source 1..20: mol_type = other DNA
ttaagctccacagatgattc

SEQ ID NO: 33516 - DNA, 20 bp, synthetic construct
  misc_feature 1..20: note = Description of Artificial Sequence: Synthetic oligonucleotide
  misc_feature 1..20: note = Target: FXN; (+) strand; PAM type: YTN; PAM sequence: TTT
  source 1..20: mol_type = other DNA
taagctccacagatgattcc

SEQ ID NO: 33517 - DNA, 20 bp, synthetic construct
  misc_feature 1..20: note = Description of Artificial Sequence: Synthetic oligonucleotide
  misc_feature 1..20: note = Target: FXN; (+) strand; PAM type: YTN; PAM sequence: TTT
  source 1..20: mol_type = other DNA
aagctccacagatgattcca

SEQ ID NO: 33518 - DNA, 20 bp, synthetic construct
  misc_feature 1..20: note = Description of Artificial Sequence: Synthetic oligonucleotide
  misc_feature 1..20: note = Target: FXN; (+) strand; PAM type: YTN; PAM sequence: TTA
  source 1..20: mol_type = other DNA
agctccacagatgattccaa

SEQ ID NO: 33519 - DNA, 20 bp, synthetic construct
  misc_feature 1..20: note = Description of Artificial Sequence: Synthetic oligonucleotide
  misc_feature 1..20: note = Target: FXN; (+) strand; PAM type: YTN; PAM sequence: CTC
  source 1..20: mol_type = other DNA
cacagatgattccaatatgc

SEQ ID NO: 33520 - DNA, 20 bp, synthetic construct
  misc_feature 1..20: note = Description of Artificial Sequence: Synthetic oligonucleotide
  misc_feature 1..20: note = Target: FXN; (+) strand; PAM type: YTN; PAM sequence: TTC
  source 1..20: mol_type = other DNA
caatatgcagctagtatgag

SEQ ID NO: 33521 - DNA, 20 bp, synthetic construct
  misc_feature 1..20: note = Description of Artificial Sequence: Synthetic oligonucleotide
  misc_feature 1..20: note = Target: FXN; (+) strand; PAM type: YTN; PAM sequence: CTA
  source 1..20: mol_type = other DNA
gtatgagaacttgttttttt

SEQ ID NO: 33522 - DNA, 20 bp, synthetic construct
  misc_feature 1..20: note = Description of Artificial Sequence: Synthetic oligonucleotide
  misc_feature 1..20: note = Target: FXN; (+) strand; PAM type: YTN; PAM sequence: CTT
  source 1..20: mol_type = other DNA
gtttttttttgaaggagtct

SEQ ID NO: 33523 - DNA, 20 bp, synthetic construct
  misc_feature 1..20: note = Description of Artificial Sequence: Synthetic oligonucleotide
  misc_feature 1..20: note = Target: FXN; (+) strand; PAM type: YTN; PAM sequence: TTG
  source 1..20: mol_type = other DNA
tttttttttgaaggagtctc

SEQ ID NO: 33524 - DNA, 20 bp, synthetic construct
  misc_feature 1..20: note = Description of Artificial Sequence: Synthetic oligonucleotide
  misc_feature 1..20: note = Target: FXN; (+) strand; PAM type: YTN; PAM sequence: TTT
  source 1..20: mol_type = other DNA
ttttttgaaggagtctcact

SEQ ID NO: 33525 - DNA, 20 bp, synthetic construct
  misc_feature 1..20: note = Description of Artificial Sequence: Synthetic oligonucleotide
  misc_feature 1..20: note = Target: FXN; (+) strand; PAM type: YTN; PAM sequence: TTT
  source 1..20: mol_type = other DNA
tttttgaaggagtctcactc

SEQ ID NO: 33526 - DNA, 20 bp, synthetic construct
  misc_feature 1..20: note = Description of Artificial Sequence: Synthetic oligonucleotide
  misc_feature 1..20: note = Target: FXN; (+) strand; PAM type: YTN; PAM sequence: TTT
  source 1..20: mol_type = other DNA
ttttgaaggagtctcactct

SEQ ID NO: 33527 - DNA, 20 bp, synthetic construct
  misc_feature 1..20: note = Description of Artificial Sequence: Synthetic oligonucleotide
  misc_feature 1..20: note = Target: FXN; (+) strand; PAM type: YTN; PAM sequence: TTT
  source 1..20: mol_type = other DNA
tttgaaggagtctcactctg

SEQ ID NO: 33528 - DNA, 20 bp, synthetic construct
  misc_feature 1..20: note = Description of Artificial Sequence: Synthetic oligonucleotide
  misc_feature 1..20: note = Target: FXN; (+) strand; PAM type: YTN; PAM sequence: TTT
  source 1..20: mol_type = other DNA
ttgaaggagtctcactctgt

SEQ ID NO: 33529 - DNA, 20 bp, synthetic construct
  misc_feature 1..20: note = Description of Artificial Sequence: Synthetic oligonucleotide
  misc_feature 1..20: note = Target: FXN; (+) strand; PAM type: YTN; PAM sequence: TTT
  source 1..20: mol_type = other DNA
tgaaggagtctcactctgtc

SEQ ID NO: 33530 - DNA, 20 bp, synthetic construct
  misc_feature 1..20: note = Description of Artificial Sequence: Synthetic oligonucleotide
  misc_feature 1..20: note = Target: FXN; (+) strand; PAM type: YTN; PAM sequence: TTT
  source 1..20: mol_type = other DNA
gaaggagtctcactctgtca

SEQ ID NO: 33531 - DNA, 20 bp, synthetic construct
  misc_feature 1..20: note = Description of Artificial Sequence: Synthetic oligonucleotide
  misc_feature 1..20: note = Target: FXN; (+) strand; PAM type: YTN; PAM sequence: TTG
  source 1..20: mol_type = other DNA
aaggagtctcactctgtcac

SEQ ID NO: 33532 - DNA, 20 bp, synthetic construct
  misc_feature 1..20: note = Description of Artificial Sequence: Synthetic oligonucleotide
  misc_feature 1..20: note = Target: FXN; (+) strand; PAM type: YTN; PAM sequence: CTC
  source 1..20: mol_type = other DNA
actctgtcacccaggctgga

SEQ ID NO: 33533 - DNA, 20 bp, synthetic construct
  misc_feature 1..20: note = Description of Artificial Sequence: Synthetic oligonucleotide
  misc_feature 1..20: note = Target: FXN; (+) strand; PAM type: YTN; PAM sequence: CTC
  source 1..20: mol_type = other DNA
tgtcacccaggctggagtgc

SEQ ID NO: 33534 - DNA, 20 bp, synthetic construct
  misc_feature 1..20: note = Description of Artificial Sequence: Synthetic oligonucleotide
  misc_feature 1..20: note = Target: FXN; (+) strand; PAM type: YTN; PAM sequence: CTG
  source 1..20: mol_type = other DNA
tcacccaggctggagtgcag

SEQ ID NO: 33535 - DNA, 20 bp, synthetic construct
  misc_feature 1..20: note = Description of Artificial Sequence: Synthetic oligonucleotide
  misc_feature 1..20: note = Target: FXN; (+) strand; PAM type: YTN; PAM sequence: CTG
  source 1..20: mol_type = other DNA
gagtgcagtggcgcaatctc

SEQ ID NO: 33536 - DNA, 20 bp, synthetic construct
  misc_feature 1..20: note = Description of Artificial Sequence: Synthetic oligonucleotide
  misc_feature 1..20: note = Target: FXN; (+) strand; PAM type: YTN; PAM sequence: CTC
  source 1..20: mol_type = other DNA
ggctcactgctccgcttcct

SEQ ID NO: 33537 - DNA, 20 bp, synthetic construct
  misc_feature 1..20: note = Description of Artificial Sequence: Synthetic oligonucleotide
  misc_feature 1..20: note = Target: FXN; (+) strand; PAM type: YTN; PAM sequence: CTC
  source 1..20: mol_type = other DNA
actgctccgcttcctgggtt

SEQ ID NO: 33538 - DNA, 20 bp, synthetic construct
  misc_feature 1..20: note = Description of Artificial Sequence: Synthetic oligonucleotide
  misc_feature 1..20: note = Target: FXN; (+) strand; PAM type: YTN; PAM sequence: CTG
  source 1..20: mol_type = other DNA
ctccgcttcctgggttcaag

SEQ ID NO: 33539 - DNA, 20 bp, synthetic construct
  misc_feature 1..20: note = Description of Artificial Sequence: Synthetic oligonucleotide
  misc_feature 1..20: note = Target: FXN; (+) strand; PAM type: YTN; PAM sequence: CTC
  source 1..20: mol_type = other DNA
cgcttcctgggttcaagcag

SEQ ID NO: 33540 - DNA, 20 bp, synthetic construct
  misc_feature 1..20: note = Description of Artificial Sequence: Synthetic oligonucleotide
  misc_feature 1..20: note = Target: FXN; (+) strand; PAM type: YTN; PAM sequence: CTT
  source 1..20: mol_type = other DNA
cctgggttcaagcagttctc

SEQ ID NO: 33541 - DNA, 20 bp, synthetic construct
  misc_feature 1..20: note = Description of Artificial Sequence: Synthetic oligonucleotide
  misc_feature 1..20: note = Target: FXN; (+) strand; PAM type: YTN; PAM sequence: TTC
  source 1..20: mol_type = other DNA
ctgggttcaagcagttctcc

SEQ ID NO: 33542 - DNA, 20 bp, synthetic construct
  misc_feature 1..20: note = Description of Artificial Sequence: Synthetic oligonucleotide
  misc_feature 1..20: note = Target: FXN; (+) strand; PAM type: YTN; PAM sequence: CTG
  source 1..20: mol_type = other DNA
ggttcaagcagttctcctgc

SEQ ID NO: 33543 - DNA, 20 bp, synthetic construct
  misc_feature 1..20: note = Description of Artificial Sequence: Synthetic oligonucleotide
  misc_feature 1..20: note = Target: FXN; (+) strand; PAM type: YTN; PAM sequence: TTC
  source 1..20: mol_type = other DNA
aagcagttctcctgcctcag

SEQ ID NO: 33544 - DNA, 20 bp, synthetic construct
  misc_feature 1..20: note = Description of Artificial Sequence: Synthetic oligonucleotide
  misc_feature 1..20: note = Target: FXN; (+) strand; PAM type: YTN; PAM sequence: TTC
  source 1..20: mol_type = other DNA
tcctgcctcagcctcccgag

SEQ ID NO: 33545 - DNA, 20 bp, synthetic construct
  misc_feature 1..20: note = Description of Artificial Sequence: Synthetic oligonucleotide
  misc_feature 1..20: note = Target: FXN; (+) strand; PAM type: YTN; PAM sequence: CTC
  source 1..20: mol_type = other DNA
ctgcctcagcctcccgagta

SEQ ID NO: 33546 - DNA, 20 bp, synthetic construct
  misc_feature 1..20: note = Description of Artificial Sequence: Synthetic oligonucleotide
  misc_feature 1..20: note = Target: FXN; (+) strand; PAM type: YTN; PAM sequence: CTG
  source 1..20: mol_type = other DNA
cctcagcctcccgagtagct

SEQ ID NO: 33547 - DNA, 20 bp, synthetic construct
  misc_feature 1..20: note = Description of Artificial Sequence: Synthetic oligonucleotide
  misc_feature 1..20: note = Target: FXN; (+) strand; PAM type: YTN; PAM sequence: CTC
  source 1..20: mol_type = other DNA
agcctcccgagtagctggga

SEQ ID NO: 33548 - DNA, 20 bp, synthetic construct
  misc_feature 1..20: note = Description of Artificial Sequence: Synthetic oligonucleotide
  misc_feature 1..20: note = Target: FXN; (+) strand; PAM type: YTN; PAM sequence: CTC
  source 1..20: mol_type = other DNA
ccgagtagctgggattatag

SEQ ID NO: 33549 - DNA, 20 bp, synthetic construct
  misc_feature 1..20: note = Description of Artificial Sequence: Synthetic oligonucleotide
  misc_feature 1..20: note = Target: FXN; (+) strand; PAM type: YTN; PAM sequence: CTG
  source 1..20: mol_type = other DNA
ggattataggcatctgccac

SEQ ID NO: 33550 - DNA, 20 bp, synthetic construct
  misc_feature 1..20: note = Description of Artificial Sequence: Synthetic oligonucleotide
  misc_feature 1..20: note = Target: FXN; (+) strand; PAM type: YTN; PAM sequence: TTA
  source 1..20: mol_type = other DNA
taggcatctgccaccatgcc

SEQ ID NO: 33551 - DNA, 20 bp, synthetic construct
  misc_feature 1..20: note = Description of Artificial Sequence: Synthetic oligonucleotide
  misc_feature 1..20: note = Target: FXN; (+) strand; PAM type: YTN; PAM sequence: CTG
  source 1..20: mol_type = other DNA
ccaccatgcccagctaattt

SEQ ID NO: 33552 - DNA, 20 bp, synthetic construct
  misc_feature 1..20: note = Description of Artificial Sequence: Synthetic oligonucleotide
  misc_feature 1..20: note = Target: FXN; (+) strand; PAM type: YTN; PAM sequence: CTA
  source 1..20: mol_type = other DNA
atttttgcattttagtaaag

SEQ ID NO: 33553 - DNA, 20 bp, synthetic construct
  misc_feature 1..20: note = Description of Artificial Sequence: Synthetic oligonucleotide
  misc_feature 1..20: note = Target: FXN; (+) strand; PAM type: YTN; PAM sequence: TTT
  source 1..20: mol_type = other DNA
ttgcattttagtaaagacgg

SEQ ID NO: 33554 - DNA, 20 bp, synthetic construct
  misc_feature 1..20: note = Description of Artificial Sequence: Synthetic oligonucleotide
  misc_feature 1..20: note = Target: FXN; (+) strand; PAM type: YTN; PAM sequence: TTT
  source 1..20: mol_type = other DNA
tgcattttagtaaagacggg

SEQ ID NO: 33555 - DNA, 20 bp, synthetic construct
  misc_feature 1..20: note = Description of Artificial Sequence: Synthetic oligonucleotide
  misc_feature 1..20: note = Target: FXN; (+) strand; PAM type: YTN; PAM sequence: TTT
  source 1..20: mol_type = other DNA
gcattttagtaaagacgggg

SEQ ID NO: 33556 - DNA, 20 bp, synthetic construct
  misc_feature 1..20: note = Description of Artificial Sequence: Synthetic oligonucleotide
  misc_feature 1..20: note = Target: FXN; (+) strand; PAM type: YTN; PAM sequence: TTG
  source 1..20: mol_type = other DNA
cattttagtaaagacggggt

SEQ ID NO: 33557 - DNA, 20 bp, synthetic construct
  misc_feature 1..20: note = Description of Artificial Sequence: Synthetic oligonucleotide
  misc_feature 1..20: note = Target: FXN; (+) strand; PAM type: YTN; PAM sequence: TTT
  source 1..20: mol_type = other DNA
tagtaaagacggggtttcac

SEQ ID NO: 33558 - DNA, 20 bp, synthetic construct
  misc_feature 1..20: note = Description of Artificial Sequence: Synthetic oligonucleotide
  misc_feature 1..20: note = Target: FXN; (+) strand; PAM type: YTN; PAM sequence: TTT
  source 1..20: mol_type = other DNA
agtaaagacggggtttcacc

SEQ ID NO: 33559 - DNA, 20 bp, synthetic construct
  misc_feature 1..20: note = Description of Artificial Sequence: Synthetic oligonucleotide
  misc_feature 1..20: note = Target: FXN; (+) strand; PAM type: YTN; PAM sequence: TTA
  source 1..20: mol_type = other DNA
gtaaagacggggtttcacca

SEQ ID NO: 33560 - DNA, 20 bp, synthetic construct
  misc_feature 1..20: note = Description of Artificial Sequence: Synthetic oligonucleotide
  misc_feature 1..20: note = Target: FXN; (+) strand; PAM type: YTN; PAM sequence: TTT
  source 1..20: mol_type = other DNA
caccatgttggttaggctgg

SEQ ID NO: 33561 - DNA, 20 bp, synthetic construct
  misc_feature 1..20: note = Description of Artificial Sequence: Synthetic oligonucleotide
  misc_feature 1..20: note = Target: FXN; (+) strand; PAM type: YTN; PAM sequence: TTC
  source 1..20: mol_type = other DNA
accatgttggttaggctggt

SEQ ID NO: 33562 - DNA, 20 bp, synthetic construct
  misc_feature 1..20: note = Description of Artificial Sequence: Synthetic oligonucleotide
  misc_feature 1..20: note = Target: FXN; (+) strand; PAM type: YTN; PAM sequence: TTG
  source 1..20: mol_type = other DNA
gttaggctggtctcgatctc

SEQ ID NO: 33563 - DNA, 20 bp, synthetic construct
  misc_feature 1..20: note = Description of Artificial Sequence: Synthetic oligonucleotide
  misc_feature 1..20: note = Target: FXN; (+) strand; PAM type: YTN; PAM sequence: TTA
  source 1..20: mol_type = other DNA
ggctggtctcgatctcctga

SEQ ID NO: 33564 - DNA, 20 bp, synthetic construct
  misc_feature 1..20: note = Description of Artificial Sequence: Synthetic oligonucleotide
  misc_feature 1..20: note = Target: FXN; (+) strand; PAM type: YTN; PAM sequence: CTG
  source 1..20: mol_type = other DNA
gtctcgatctcctgacctca

SEQ ID NO: 33565 - DNA, 20 bp, synthetic construct
  misc_feature 1..20: note = Description of Artificial Sequence: Synthetic oligonucleotide
  misc_feature 1..20: note = Target: FXN; (+) strand; PAM type: YTN; PAM sequence: CTC
  source 1..20: mol_type = other DNA
gatctcctgacctcaaatgg

SEQ ID NO: 33566 - DNA, 20 bp, synthetic construct
  misc_feature 1..20: note = Description of Artificial Sequence: Synthetic oligonucleotide
  misc_feature 1..20: note = Target: FXN; (+) strand; PAM type: YTN; PAM sequence: CTC
  source 1..20: mol_type = other DNA
ctgacctcaaatggtccacc

SEQ ID NO: 33567 - DNA, 20 bp, synthetic construct
  misc_feature 1..20: note = Description of Artificial Sequence: Synthetic oligonucleotide
  misc_feature 1..20: note = Target: FXN; (+) strand; PAM type: YTN; PAM sequence: CTG
  source 1..20: mol_type = other DNA
acctcaaatggtccaccccc

SEQ ID NO: 33568 - DNA, 20 bp, synthetic construct
  misc_feature 1..20: note = Description of Artificial Sequence: Synthetic oligonucleotide
  misc_feature 1..20: note = Target: FXN; (+) strand; PAM type: YTN; PAM sequence: CTC
  source 1..20: mol_type = other DNA
aaatggtccacccccatcag

SEQ ID NO: 33569 - DNA, 20 bp, synthetic construct
  misc_feature 1..20: note = Description of Artificial Sequence: Synthetic oligonucleotide
  misc_feature 1..20: note = Target: FXN; (+) strand; PAM type: YTN; PAM sequence: CTT
  source 1..20: mol_type = other DNA
ccaaagttttgggataacag

SEQ ID NO: 33570 - DNA, 20 bp, synthetic construct
  misc_feature 1..20: note = Description of Artificial Sequence: Synthetic oligonucleotide
  misc_feature 1..20: note = Target: FXN; (+) strand; PAM type: YTN; PAM sequence: TTC
  source 1..20: mol_type = other DNA
caaagttttgggataacagg

SEQ ID NO: 33571 - DNA, 20 bp, synthetic construct
  misc_feature 1..20: note = Description of Artificial Sequence: Synthetic oligonucleotide
  misc_feature 1..20: note = Target: FXN; (+) strand; PAM type: YTN; PAM sequence: TTT
  source 1..20: mol_type = other DNA
tgggataacaggcgtgagcc

SEQ ID NO: 33572 - DNA, 20 bp, synthetic construct
  misc_feature 1..20: note = Description of Artificial Sequence: Synthetic oligonucleotide
  misc_feature 1..20: note = Target: FXN; (+) strand; PAM type: YTN; PAM sequence: TTT
  source 1..20: mol_type = other DNA
gggataacaggcgtgagcca

SEQ ID NO: 33573 - DNA, 20 bp, synthetic construct
  misc_feature 1..20: note = Description of Artificial Sequence: Synthetic oligonucleotide
  misc_feature 1..20: note = Target: FXN; (+) strand; PAM type: YTN; PAM sequence: TTG
  source 1..20: mol_type = other DNA
ggataacaggcgtgagccac

SEQ ID NO: 33574 - DNA, 20 bp, synthetic construct
  misc_feature 1..20: note = Description of Artificial Sequence: Synthetic oligonucleotide
  misc_feature 1..20: note = Target: FXN; (+) strand; PAM type: YTN; PAM sequence: CTG
  source 1..20: mol_type = other DNA
gtgtgagaacttctgagttg

SEQ ID NO: 33575 - DNA, 20 bp, synthetic construct
  misc_feature 1..20: note = Description of Artificial Sequence: Synthetic oligonucleotide
  misc_feature 1..20: note = Target: FXN; (+) strand; PAM type: YTN; PAM sequence: CTT
  source 1..20: mol_type = other DNA
ctgagttggatgaaacatta

SEQ ID NO: 33576 - DNA, 20 bp, synthetic construct
  misc_feature 1..20: note = Description of Artificial Sequence: Synthetic oligonucleotide
  misc_feature 1..20: note = Target: FXN; (+) strand; PAM type: YTN; PAM sequence: TTC
  source 1..20: mol_type = other DNA
tgagttggatgaaacattag

SEQ ID NO: 33577 - DNA, 20 bp, synthetic construct
  misc_feature 1..20: note = Description of Artificial Sequence: Synthetic oligonucleotide
  misc_feature 1..20: note = Target: FXN; (+) strand; PAM type: YTN; PAM sequence: CTG
  source 1..20: mol_type = other DNA
agttggatgaaacattagcc

SEQ ID NO: 33578 - DNA, 20 bp, synthetic construct
  misc_feature 1..20: note = Description of Artificial Sequence: Synthetic oligonucleotide
  misc_feature 1..20: note = Target: FXN; (+) strand; PAM type: YTN; PAM sequence: TTG
  source 1..20: mol_type = other DNA
gatgaaacattagccccaga

SEQ ID NO: 33579 - DNA, 20 bp, synthetic construct
  misc_feature 1..20: note = Description of Artificial Sequence: Synthetic oligonucleotide
  misc_feature 1..20: note = Target: FXN; (+) strand; PAM type: YTN; PAM sequence: TTA
  source 1..20: mol_type = other DNA
gccccagatcctagaagcca

SEQ ID NO: 33580 - DNA, 20 bp, synthetic construct
  misc_feature 1..20: note = Description of Artificial Sequence: Synthetic oligonucleotide
  misc_feature 1..20: note = Target: FXN; (+) strand; PAM type: YTN; PAM sequence: CTA
  source 1..20: mol_type = other DNA
gaagccagggaagtgctggt

SEQ ID NO: 33581 - DNA, 20 bp, synthetic construct
  misc_feature 1..20: note = Description of Artificial Sequence: Synthetic oligonucleotide
  misc_feature 1..20: note = Target: FXN; (+) strand; PAM type: YTN; PAM sequence: CTG
  source 1..20: mol_type = other DNA
gtctttatcgactggccacc

SEQ ID NO: 33582 - DNA, 20 bp, synthetic construct
  misc_feature 1..20: note = Description of Artificial Sequence: Synthetic oligonucleotide
  misc_feature 1..20: note = Target: FXN; (+) strand; PAM type: YTN; PAM sequence: CTT
  source 1..20: mol_type = other DNA
tatcgactggccaccaggtg

SEQ ID NO: 33583 - DNA, 20 bp, synthetic construct
  misc_feature 1..20: note = Description of Artificial Sequence: Synthetic oligonucleotide
  misc_feature 1..20: note = Target: FXN; (+) strand; PAM type: YTN; PAM sequence: TTT
  source 1..20: mol_type = other DNA
atcgactggccaccaggtgg

SEQ ID NO: 33584 - DNA, 20 bp, synthetic construct
  misc_feature 1..20: note = Description of Artificial Sequence: Synthetic oligonucleotide
  misc_feature 1..20: note = Target: FXN; (+) strand; PAM type: YTN; PAM sequence: TTA
  source 1..20: mol_type = other DNA
tcgactggccaccaggtggc

SEQ ID NO: 33585 - DNA, 20 bp, synthetic construct
  misc_feature 1..20: note = Description of Artificial Sequence: Synthetic oligonucleotide
  misc_feature 1..20: note = Target: FXN; (+) strand; PAM type: YTN; PAM sequence: CTG
  source 1..20: mol_type = other DNA
gccaccaggtggcagatttg

SEQ ID NO: 33586 - DNA, 20 bp, synthetic construct
  misc_feature 1..20: note = Description of Artificial Sequence: Synthetic oligonucleotide
  misc_feature 1..20: note = Target: FXN; (+) strand; PAM type: YTN; PAM sequence: TTT
  source 1..20: mol_type = other DNA
gggcaagggtctgcctttgg

SEQ ID NO: 33587 - DNA, 20 bp, synthetic construct
  misc_feature 1..20: note = Description of Artificial Sequence: Synthetic oligonucleotide
  misc_feature 1..20: note = Target: FXN; (+) strand; PAM type: YTN; PAM sequence: TTG
  source 1..20: mol_type = other DNA
ggcaagggtctgcctttggg

SEQ ID NO: 33588 - DNA, 20 bp, synthetic construct
  misc_feature 1..20: note = Description of Artificial Sequence: Synthetic oligonucleotide
  misc_feature 1..20: note = Target: FXN; (+) strand; PAM type: YTN; PAM sequence: CTG
  source 1..20: mol_type = other DNA
cctttgggtttagaattatt

SEQ ID NO: 33589 - DNA, 20 bp, synthetic construct
  misc_feature 1..20: note = Description of Artificial Sequence: Synthetic oligonucleotide
  misc_feature 1..20: note = Target: FXN; (+) strand; PAM type: YTN; PAM sequence: CTT
  source 1..20: mol_type = other DNA
tgggtttagaattattgctt

SEQ ID NO: 33590 - DNA, 20 bp, synthetic construct
  misc_feature 1..20: note = Description of Artificial Sequence: Synthetic oligonucleotide
  misc_feature 1..20: note = Target: FXN; (+) strand; PAM type: YTN; PAM sequence: TTT
  source 1..20: mol_type = other DNA
gggtttagaattattgctta

SEQ ID NO: 33591 - DNA, 20 bp, synthetic construct
  misc_feature 1..20: note = Description of Artificial Sequence: Synthetic oligonucleotide
  misc_feature 1..20: note = Target: FXN; (+) strand; PAM type: YTN; PAM sequence: TTG
  source 1..20: mol_type = other DNA
ggtttagaattattgcttag

SEQ ID NO: 33592 - DNA, 20 bp, synthetic construct
  misc_feature 1..20: note = Description of Artificial Sequence: Synthetic oligonucleotide
  misc_feature 1..20: note = Target: FXN; (+) strand; PAM type: YTN; PAM sequence: TTT
  source 1..20: mol_type = other DNA
agaattattgcttaggcctt

SEQ ID NO: 33593 - DNA, 20 bp, synthetic construct
  misc_feature 1..20: note = Description of Artificial Sequence: Synthetic oligonucleotide
  misc_feature 1..20: note = Target: FXN; (+) strand; PAM type: YTN; PAM sequence: TTA
  source 1..20: mol_type = other DNA
gaattattgcttaggcctta

SEQ ID NO: 33594 - DNA, 20 bp, synthetic construct
  misc_feature 1..20: note = Description of Artificial Sequence: Synthetic oligonucleotide
  misc_feature 1..20: note = Target: FXN; (+) strand; PAM type: YTN; PAM sequence: TTA
  source 1..20: mol_type = other DNA
ttgcttaggccttaaagtag

SEQ ID NO: 33595 - DNA, 20 bp, synthetic construct
  misc_feature 1..20: note = Description of Artificial Sequence: Synthetic oligonucleotide
  misc_feature 1..20: note = Target: FXN; (+) strand; PAM type: YTN; PAM sequence: TTG
  source 1..20: mol_type = other DNA
cttaggccttaaagtagttc

SEQ ID NO: 33596 - DNA, 20 bp, synthetic construct
  misc_feature 1..20: note = Description of Artificial Sequence: Synthetic oligonucleotide
  misc_feature 1..20: note = Target: FXN; (+) strand; PAM type: YTN; PAM sequence: CTT
  source 1..20: mol_type = other DNA
aggccttaaagtagttcttt

SEQ ID NO: 33597 - DNA, 20 bp, synthetic construct
  misc_feature 1..20: note = Description of Artificial Sequence: Synthetic oligonucleotide
  misc_feature 1..20: note = Target: FXN; (+) strand; PAM type: YTN; PAM sequence: TTA
  source 1..20: mol_type = other DNA
ggccttaaagtagttctttt

SEQ ID NO: 33598 - DNA, 20 bp, synthetic construct
  misc_feature 1..20: note = Description of Artificial Sequence: Synthetic oligonucleotide
  misc_feature 1..20: note = Target: FXN; (+) strand; PAM type: YTN; PAM sequence: CTT
  source 1..20: mol_type = other DNA
aaagtagttcttttttgcca

SEQ ID NO: 33599 - DNA, 20 bp, synthetic construct
  misc_feature 1..20: note = Description of Artificial Sequence: Synthetic oligonucleotide
  misc_feature 1..20: note = Target: FXN; (+) strand; PAM type: YTN; PAM sequence: TTA
  source 1..20: mol_type = other DNA
aagtagttcttttttgccag

SEQ ID NO: 33600 - DNA, 20 bp, synthetic construct
  misc_feature 1..20: note = Description of Artificial Sequence: Synthetic oligonucleotide
  misc_feature 1..20: note = Target: FXN; (+) strand; PAM type: YTN; PAM sequence: TTC
  source 1..20: mol_type = other DNA
ttttttgccagtgggagaaa

SEQ ID NO: 33601 - DNA, 20 bp, synthetic construct
  misc_feature 1..20: note = Description of Artificial Sequence: Synthetic oligonucleotide
  misc_feature 1..20: note = Target: FXN; (+) strand; PAM type: YTN; PAM sequence: CTT
  source 1..20: mol_type = other DNA
ttttgccagtgggagaaaat

SEQ ID NO: 33602 - DNA, 20 bp, synthetic construct
  misc_feature 1..20: note = Description of Artificial Sequence: Synthetic oligonucleotide
  misc_feature 1..20: note = Target: FXN; (+) strand; PAM type: YTN; PAM sequence: TTT
  source 1..20: mol_type = other DNA
tttgccagtgggagaaaatc

SEQ ID NO: 33603 - DNA, 20 bp, synthetic construct
  misc_feature 1..20: note = Description of Artificial Sequence: Synthetic oligonucleotide
  misc_feature 1..20: note = Target: FXN; (+) strand; PAM type: YTN; PAM sequence: TTT
  source 1..20: mol_type = other DNA
ttgccagtgggagaaaatcc

SEQ ID NO: 33604 - DNA, 20 bp, synthetic construct
  misc_feature 1..20: note = Description of Artificial Sequence: Synthetic oligonucleotide
  misc_feature 1..20: note = Target: FXN; (+) strand; PAM type: YTN; PAM sequence: TTT
  source 1..20: mol_type = other DNA
tgccagtgggagaaaatccc

SEQ ID NO: 33605 - DNA, 20 bp, synthetic construct
  misc_feature 1..20: note = Description of Artificial Sequence: Synthetic oligonucleotide
  misc_feature 1..20: note = Target: FXN; (+) strand; PAM type: YTN; PAM sequence: TTT
  source 1..20: mol_type = other DNA
gccagtgggagaaaatccct

SEQ ID NO: 33606 - DNA, 20 bp, synthetic construct
  misc_feature 1..20: note = Description of Artificial Sequence: Synthetic oligonucleotide
  misc_feature 1..20: note = Target: FXN; (+) strand; PAM type: YTN; PAM sequence: TTG
  source 1..20: mol_type = other DNA
ccagtgggagaaaatccctc

SEQ ID NO: 33607 - DNA, 20 bp, synthetic construct
  misc_feature 1..20: note = Description of Artificial Sequence: Synthetic oligonucleotide
  misc_feature 1..20: note = Target: FXN; (+) strand; PAM type: YTN; PAM sequence: CTC
  source 1..20: mol_type = other DNA
aaagatggttttctgggttg

SEQ ID NO: 33608 - DNA, 20 bp, synthetic construct
  misc_feature 1..20: note = Description of Artificial Sequence: Synthetic oligonucleotide
  misc_feature 1..20: note = Target: FXN; (+) strand; PAM type: YTN; PAM sequence: TTT
  source 1..20: mol_type = other DNA
tctgggttggttggtttgtt

SEQ ID NO: 33609 - DNA, 20 bp, synthetic construct
  misc_feature 1..20: note = Description of Artificial Sequence: Synthetic oligonucleotide
  misc_feature 1..20: note = Target: FXN; (+) strand; PAM type: YTN; PAM sequence: TTT
  source 1..20: mol_type = other DNA
ctgggttggttggtttgttt

SEQ ID NO: 33610 - DNA, 20 bp, synthetic construct
  misc_feature 1..20: note = Description of Artificial Sequence: Synthetic oligonucleotide
  misc_feature 1..20: note = Target: FXN; (+) strand; PAM type: YTN; PAM sequence: TTC
  source 1..20: mol_type = other DNA
tgggttggttggtttgtttg

SEQ ID NO: 33611 - DNA, 20 bp, synthetic construct
  misc_feature 1..20: note = Description of Artificial Sequence: Synthetic oligonucleotide
  misc_feature 1..20: note = Target: FXN; (+) strand; PAM type: YTN; PAM sequence: CTG
  source 1..20: mol_type = other DNA
ggttggttggtttgtttgtc

SEQ ID NO: 33612 - DNA, 20 bp, synthetic construct
  misc_feature 1..20: note = Description of Artificial Sequence: Synthetic oligonucleotide
  misc_feature 1..20: note = Target: FXN; (+) strand; PAM type: YTN; PAM sequence: TTG
  source 1..20: mol_type = other DNA
gttggtttgtttgtctgttt

SEQ ID NO: 33613 - DNA, 20 bp, synthetic construct
  misc_feature 1..20: note = Description of Artificial Sequence: Synthetic oligonucleotide
  misc_feature 1..20: note = Target: FXN; (+) strand; PAM type: YTN; PAM sequence: TTG
  source 1..20: mol_type = other DNA
gtttgtttgtctgtttgttt

SEQ ID NO: 33614 - DNA, 20 bp, synthetic construct
  misc_feature 1..20: note = Description of Artificial Sequence: Synthetic oligonucleotide
  misc_feature 1..20: note = Target: FXN; (+) strand; PAM type: YTN; PAM sequence: TTT
  source 1..20: mol_type = other DNA
gtttgtctgtttgtttgttt

SEQ ID NO: 33615 - DNA, 20 bp, synthetic construct
  misc_feature 1..20: note = Description of Artificial Sequence: Synthetic oligonucleotide
  misc_feature 1..20: note = Target: FXN; (+) strand; PAM type: YTN; PAM sequence: TTG
  source 1..20: mol_type = other DNA
tttgtctgtttgtttgtttt

SEQ ID NO: 33616 - DNA, 20 bp, synthetic construct
  misc_feature 1..20: note = Description of Artificial Sequence: Synthetic oligonucleotide
  misc_feature 1..20: note = Target: FXN; (+) strand; PAM type: YTN; PAM sequence: TTT
  source 1..20: mol_type = other DNA
gtctgtttgtttgttttttg

SEQ ID NO: 33617 - DNA, 20 bp, synthetic construct
  misc_feature 1..20: note = Description of Artificial Sequence: Synthetic oligonucleotide
  misc_feature 1..20: note = Target: FXN; (+) strand; PAM type: YTN; PAM sequence: TTG
  source 1..20: mol_type = other DNA
tctgtttgtttgttttttga

SEQ ID NO: 33618 - DNA, 20 bp, synthetic construct
  misc_feature 1..20: note = Description of Artificial Sequence: Synthetic oligonucleotide
  misc_feature 1..20: note = Target: FXN; (+) strand; PAM type: YTN; PAM sequence: CTG
  source 1..20: mol_type = other DNA
tttgtttgttttttgagaca

SEQ ID NO: 33619 - DNA, 20 bp, synthetic construct
  misc_feature 1..20: note = Description of Artificial Sequence: Synthetic oligonucleotide
  misc_feature 1..20: note = Target: FXN; (+) strand; PAM type: YTN; PAM sequence: TTT
  source 1..20: mol_type = other DNA
gtttgttttttgagacagag

SEQ ID NO: 33620 - DNA, 20 bp, synthetic construct
  misc_feature 1..20: note = Description of Artificial Sequence: Synthetic oligonucleotide
  misc_feature 1..20: note = Target: FXN; (+) strand; PAM type: YTN; PAM sequence: TTG
  source 1..20: mol_type = other DNA
tttgttttttgagacagagt

SEQ ID NO: 33621 - DNA, 20 bp, synthetic construct
  misc_feature 1..20: note = Description of Artificial Sequence: Synthetic oligonucleotide
  misc_feature 1..20: note = Target: FXN; (+) strand; PAM type: YTN; PAM sequence: TTT
  source 1..20: mol_type = other DNA
gttttttgagacagagtctc

SEQ ID NO: 33622 - DNA, 20 bp, synthetic construct
  misc_feature 1..20: note = Description of Artificial Sequence: Synthetic oligonucleotide
  misc_feature 1..20: note = Target: FXN; (+) strand; PAM type: YTN; PAM sequence: TTG
  source 1..20: mol_type = other DNA
ttttttgagacagagtctcc

SEQ ID NO: 33623 - DNA, 20 bp, synthetic construct
  misc_feature 1..20: note = Description of Artificial Sequence: Synthetic oligonucleotide
  misc_feature 1..20: note = Target: FXN; (+) strand; PAM type: YTN; PAM sequence: TTT
  source 1..20: mol_type = other DNA
tttgagacagagtctccctc

SEQ ID NO: 33624 - DNA, 20 bp, synthetic construct
  misc_feature 1..20: note = Description of Artificial Sequence: Synthetic oligonucleotide
  misc_feature 1..20: note = Target: FXN; (+) strand; PAM type: YTN; PAM sequence: TTT
  source 1..20: mol_type = other DNA
ttgagacagagtctccctct

SEQ ID NO: 33625 - DNA, 20 bp, synthetic construct
  misc_feature 1..20: note = Description of Artificial Sequence: Synthetic oligonucleotide
  misc_feature 1..20: note = Target: FXN; (+) strand; PAM type: YTN; PAM sequence: TTT
  source 1..20: mol_type = other DNA
tgagacagagtctccctctg

SEQ ID NO: 33626 - DNA, 20 bp, synthetic construct
  misc_feature 1..20: note = Description of Artificial Sequence: Synthetic oligonucleotide
  misc_feature 1..20: note = Target: FXN; (+) strand; PAM type: YTN; PAM sequence: TTT
  source 1..20: mol_type = other DNA
gagacagagtctccctctgt

SEQ ID NO: 33627 - DNA, 20 bp, synthetic construct
  misc_feature 1..20: note = Description of Artificial Sequence: Synthetic oligonucleotide
  misc_feature 1..20: note = Target: FXN; (+) strand; PAM type: YTN; PAM sequence: TTG
  source 1..20: mol_type = other DNA
agacagagtctccctctgtt

SEQ ID NO: 33628 - DNA, 20 bp, synthetic construct
  misc_feature 1..20: note = Description of Artificial Sequence: Synthetic oligonucleotide
  misc_feature 1..20: note = Target: FXN; (+) strand; PAM type: YTN; PAM sequence: CTC
  source 1..20: mol_type = other DNA
cctctgttattcagcctgga

SEQ ID NO: 33629 - DNA, 20 bp, synthetic construct
  misc_feature 1..20: note = Description of Artificial Sequence: Synthetic oligonucleotide
  misc_feature 1..20: note = Target: FXN; (+) strand; PAM type: YTN; PAM sequence: CTC
  source 1..20: mol_type = other DNA
tgttattcagcctggagtgc

SEQ ID NO: 33630 - DNA, 20 bp, synthetic construct
  misc_feature 1..20: note = Description of Artificial Sequence: Synthetic oligonucleotide
  misc_feature 1..20: note = Target: FXN; (+) strand; PAM type: YTN; PAM sequence: CTG
  source 1..20: mol_type = other DNA
ttattcagcctggagtgcag

SEQ ID NO: 33631 - DNA, 20 bp, synthetic construct
  misc_feature 1..20: note = Description of Artificial Sequence: Synthetic oligonucleotide
  misc_feature 1..20: note = Target: FXN; (+) strand; PAM type: YTN; PAM sequence: TTA
  source 1..20: mol_type = other DNA
ttcagcctggagtgcagtgg

SEQ ID NO: 33632 - DNA, 20 bp, synthetic construct
  misc_feature 1..20: note = Description of Artificial Sequence: Synthetic oligonucleotide
  misc_feature 1..20: note = Target: FXN; (+) strand; PAM type: YTN; PAM sequence: TTC
  source 1..20: mol_type = other DNA
agcctggagtgcagtggcat

SEQ ID NO: 33633 - DNA, 20 bp, synthetic construct
  misc_feature 1..20: note = Description of Artificial Sequence: Synthetic oligonucleotide
  misc_feature 1..20: note = Target: FXN; (+) strand; PAM type: YTN; PAM sequence: CTG
  source 1..20: mol_type = other DNA
gagtgcagtggcatgatctc

SEQ ID NO: 33634 - DNA, 20 bp, synthetic construct
  misc_feature 1..20: note = Description of Artificial Sequence: Synthetic oligonucleotide
  misc_feature 1..20: note = Target: FXN; (+) strand; PAM type: YTN; PAM sequence: CTC
  source 1..20: mol_type = other DNA
actgcaacctctgcctctcg

SEQ ID NO: 33635 - DNA, 20 bp, synthetic construct
  misc_feature 1..20: note = Description of Artificial Sequence: Synthetic oligonucleotide
  misc_feature 1..20: note = Target: FXN; (+) strand; PAM type: YTN; PAM sequence: CTG
  source 1..20: mol_type = other DNA
caacctctgcctctcgggtt

SEQ ID NO: 33636 - DNA, 20 bp, synthetic construct
  misc_feature 1..20: note = Description of Artificial Sequence: Synthetic oligonucleotide
  misc_feature 1..20: note = Target: FXN; (+) strand; PAM type: YTN; PAM sequence: CTC
  source 1..20: mol_type = other DNA
tgcctctcgggttcaagcag

SEQ ID NO: 33637 - DNA, 20 bp, synthetic construct
  misc_feature 1..20: note = Description of Artificial Sequence: Synthetic oligonucleotide
  misc_feature 1..20: note = Target: FXN; (+) strand; PAM type: YTN; PAM sequence: CTG
  source 1..20: mol_type = other DNA
cctctcgggttcaagcagtt

SEQ ID NO: 33638 - DNA, 20 bp, synthetic construct
  misc_feature 1..20: note = Description of Artificial Sequence: Synthetic oligonucleotide
  misc_feature 1..20: note = Target: FXN; (+) strand; PAM type: YTN; PAM sequence: CTC
  source 1..20: mol_type = other DNA
tcgggttcaagcagttctcc

SEQ ID NO: 33639 - DNA, 20 bp, synthetic construct
  misc_feature 1..20: note = Description of Artificial Sequence: Synthetic oligonucleotide
  misc_feature 1..20: note = Target: FXN; (+) strand; PAM type: YTN; PAM sequence: CTC
  source 1..20: mol_type = other DNA
gggttcaagcagttctcctg

SEQ ID NO: 33640 - DNA, 20 bp, synthetic construct
  misc_feature 1..20: note = Description of Artificial Sequence: Synthetic oligonucleotide
  misc_feature 1..20: note = Target: FXN; (+) strand; PAM type: YTN; PAM sequence: TTC
  source 1..20: mol_type = other DNA
aagcagttctcctgcctcaa

SEQ ID NO: 33641 - DNA, 20 bp, synthetic construct
  misc_feature 1..20: note = Description of Artificial Sequence: Synthetic oligonucleotide
  misc_feature 1..20: note = Target: FXN; (+) strand; PAM type: YTN; PAM sequence: TTC
  source 1..20: mol_type = other DNA
tcctgcctcaacctcccaag

SEQ ID NO: 33642 - DNA, 20 bp, synthetic construct
  misc_feature 1..20: note = Description of Artificial Sequence: Synthetic oligonucleotide
  misc_feature 1..20: note = Target: FXN; (+) strand; PAM type: YTN; PAM sequence: CTC
  source 1..20: mol_type = other DNA
ctgcctcaacctcccaagta

SEQ ID NO: 33643 - DNA, 20 bp, synthetic construct
  misc_feature 1..20: note = Description of Artificial Sequence: Synthetic oligonucleotide
  misc_feature 1..20: note = Target: FXN; (+) strand; PAM type: YTN; PAM sequence: CTG
  source 1..20: mol_type = other DNA
cctcaacctcccaagtagct

SEQ ID NO: 33644 - DNA, 20 bp, synthetic construct
  misc_feature 1..20: note = Description of Artificial Sequence: Synthetic oligonucleotide
  misc_feature 1..20: note = Target: FXN; (+) strand; PAM type: YTN; PAM sequence: CTC
  source 1..20: mol_type = other DNA
aacctcccaagtagctggaa

SEQ ID NO: 33645 - DNA, 20 bp, synthetic construct
  misc_feature 1..20: note = Description of Artificial Sequence: Synthetic oligonucleotide
  misc_feature 1..20: note = Target: FXN; (+) strand; PAM type: YTN; PAM sequence: CTC
  source 1..20: mol_type = other DNA
ccaagtagctggaattatag

SEQ ID NO: 33646 - DNA, 20 bp, synthetic construct
  misc_feature 1..20: note = Description of Artificial Sequence: Synthetic oligonucleotide
  misc_feature 1..20: note = Target: FXN; (+) strand; PAM type: YTN; PAM sequence: CTG
  source 1..20: mol_type = other DNA
gaattataggcacacgcccc

SEQ ID NO: 33647 - DNA, 20 bp, synthetic construct
  misc_feature 1..20: note = Description of Artificial Sequence: Synthetic oligonucleotide
  misc_feature 1..20: note = Target: FXN; (+) strand; PAM type: YTN; PAM sequence: TTA
  source 1..20: mol_type = other DNA
taggcacacgcccccacacc

SEQ ID NO: 33648 - DNA, 20 bp, synthetic construct
  misc_feature 1..20: note = Description of Artificial Sequence: Synthetic oligonucleotide
  misc_feature 1..20: note = Target: FXN; (+) strand; PAM type: YTN; PAM sequence: CTA
  source 1..20: mol_type = other DNA
atttttgtatttttagtaga

SEQ ID NO: 33649 - DNA, 20 bp, synthetic construct
  misc_feature 1..20: note = Description of Artificial Sequence: Synthetic oligonucleotide
  misc_feature 1..20: note = Target: FXN; (+) strand; PAM type: YTN; PAM sequence: TTT
  source 1..20: mol_type = other DNA
ttgtatttttagtagagaca

SEQ ID NO: 33650 - DNA, 20 bp, synthetic construct
  misc_feature 1..20: note = Description of Artificial Sequence: Synthetic oligonucleotide
  misc_feature 1..20: note = Target: FXN; (+) strand; PAM type: YTN; PAM sequence: TTT
  source 1..20: mol_type = other DNA
tgtatttttagtagagacag

SEQ ID NO: 33651 - DNA, 20 bp, synthetic construct
  misc_feature 1..20: note = Description of Artificial Sequence: Synthetic oligonucleotide
  misc_feature 1..20: note = Target: FXN; (+) strand; PAM type: YTN; PAM sequence: TTT
  source 1..20: mol_type = other DNA
gtatttttagtagagacagt

SEQ ID NO: 33652 - DNA, 20 bp, synthetic construct
  misc_feature 1..20: note = Description of Artificial Sequence: Synthetic oligonucleotide
  misc_feature 1..20: note = Target: FXN; (+) strand; PAM type: YTN; PAM sequence: TTG
  source 1..20: mol_type = other DNA
tatttttagtagagacagtg

SEQ ID NO: 33653 - DNA, 20 bp, synthetic construct
  misc_feature 1..20: note = Description of Artificial Sequence: Synthetic oligonucleotide
  misc_feature 1..20: note = Target: FXN; (+) strand; PAM type: YTN; PAM sequence: TTT
  source 1..20: mol_type = other DNA
ttagtagagacagtgtttca

SEQ ID NO: 33654 - DNA, 20 bp, synthetic construct
  misc_feature 1..20: note = Description of Artificial Sequence: Synthetic oligonucleotide
  misc_feature 1..20: note = Target: FXN; (+) strand; PAM type: YTN; PAM sequence: TTT
  source 1..20: mol_type = other DNA
tagtagagacagtgtttcac

SEQ ID NO: 33655 - DNA, 20 bp, synthetic construct
  misc_feature 1..20: note = Description of Artificial Sequence: Synthetic oligonucleotide
  misc_feature 1..20: note = Target: FXN; (+) strand; PAM type: YTN; PAM sequence: TTT
  source 1..20: mol_type = other DNA
agtagagacagtgtttcacc

SEQ ID NO: 33656 - DNA, 20 bp, synthetic construct
  misc_feature 1..20: note = Description of Artificial Sequence: Synthetic oligonucleotide
  misc_feature 1..20: note = Target: FXN; (+) strand; PAM type: YTN; PAM sequence: TTA
  source 1..20: mol_type = other DNA
gtagagacagtgtttcacca

SEQ ID NO: 33657 - DNA, 20 bp, synthetic construct
  misc_feature 1..20: note = Description of Artificial Sequence: Synthetic oligonucleotide
  misc_feature 1..20: note = Target: FXN; (+) strand; PAM type: YTN; PAM sequence: TTT
  source 1..20: mol_type = other DNA
caccacgttggccaggctgg

SEQ ID NO: 33658 - DNA, 20 bp, synthetic construct
  misc_feature 1..20: note = Description of Artificial Sequence: Synthetic oligonucleotide
  misc_feature 1..20: note = Target: FXN; (+) strand; PAM type: YTN; PAM sequence: TTC
  source 1..20: mol_type = other DNA
accacgttggccaggctggt

SEQ ID NO: 33659 - DNA, 20 bp, synthetic construct
  misc_feature 1..20: note = Description of Artificial Sequence: Synthetic oligonucleotide
  misc_feature 1..20: note = Target: FXN; (+) strand; PAM type: YTN; PAM sequence: TTG
  source 1..20: mol_type = other DNA
gccaggctggttttgaactc

SEQ ID NO: 33660 - DNA, 20 bp, synthetic construct
  misc_feature 1..20: note = Description of Artificial Sequence: Synthetic oligonucleotide
  misc_feature 1..20: note = Target: FXN; (+) strand; PAM type: YTN; PAM sequence: CTG
  source 1..20: mol_type = other DNA
gttttgaactcctgaactca

SEQ ID NO: 33661 - DNA, 20 bp, synthetic construct
  misc_feature 1..20: note = Description of Artificial Sequence: Synthetic oligonucleotide
  misc_feature 1..20: note = Target: FXN; (+) strand; PAM type: YTN; PAM sequence: TTT
  source 1..20: mol_type = other DNA
tgaactcctgaactcaagta

SEQ ID NO: 33662 - DNA, 20 bp, synthetic construct
  misc_feature 1..20: note = Description of Artificial Sequence: Synthetic oligonucleotide
  misc_feature 1..20: note = Target: FXN; (+) strand; PAM type: YTN; PAM sequence: TTT
  source 1..20: mol_type = other DNA
gaactcctgaactcaagtaa

SEQ ID NO: 33663 - DNA, 20 bp, synthetic construct
  misc_feature 1..20: note = Description of Artificial Sequence: Synthetic oligonucleotide
  misc_feature 1..20: note = Target: FXN; (+) strand; PAM type: YTN; PAM sequence: TTG
  source 1..20: mol_type = other DNA
aactcctgaactcaagtaat

SEQ ID NO: 33664 - DNA, 20 bp, synthetic construct
  misc_feature 1..20: note = Description of Artificial Sequence: Synthetic oligonucleotide
  misc_feature 1..20: note = Target: FXN; (+) strand; PAM type: YTN; PAM sequence: CTC
  source 1..20: mol_type = other DNA
ctgaactcaagtaatcctcc

SEQ ID NO: 33665 - DNA, 20 bp, synthetic construct
  misc_feature 1..20: note = Description of Artificial Sequence: Synthetic oligonucleotide
  misc_feature 1..20: note = Target: FXN; (+) strand; PAM type: YTN; PAM sequence: CTG
  source 1..20: mol_type = other DNA
aactcaagtaatcctcccac

SEQ ID NO: 33666 - DNA, 20 bp, synthetic construct
  misc_feature 1..20: note = Description of Artificial Sequence: Synthetic oligonucleotide
  misc_feature 1..20: note = Target: FXN; (+) strand; PAM type: YTN; PAM sequence: CTC
  source 1..20: mol_type = other DNA
aagtaatcctcccacctcag

SEQ ID NO: 33667 - DNA, 20 bp, synthetic construct
  misc_feature 1..20: note = Description of Artificial Sequence: Synthetic oligonucleotide
  misc_feature 1..20: note = Target: FXN; (+) strand; PAM type: YTN; PAM sequence: CTC
  source 1..20: mol_type = other DNA
ccacctcagcctcccaaagt

SEQ ID NO: 33668 - DNA, 20 bp, synthetic construct
  misc_feature 1..20: note = Description of Artificial Sequence: Synthetic oligonucleotide
  misc_feature 1..20: note = Target: FXN; (+) strand; PAM type: YTN; PAM sequence: CTC
  source 1..20: mol_type = other DNA
agcctcccaaagtgctagga

SEQ ID NO: 33669 - DNA, 20 bp, synthetic construct
  misc_feature 1..20: note = Description of Artificial Sequence: Synthetic oligonucleotide
  misc_feature 1..20: note = Target: FXN; (+) strand; PAM type: YTN; PAM sequence: CTC
  source 1..20: mol_type = other DNA
ccaaagtgctaggattacag

SEQ ID NO: 33670 - DNA, 20 bp, synthetic construct
  misc_feature 1..20: note = Description of Artificial Sequence: Synthetic oligonucleotide
  misc_feature 1..20: note = Target: FXN; (+) strand; PAM type: YTN; PAM sequence: CTA
  source 1..20: mol_type = other DNA
ggattacaggtgtgagccac

SEQ ID NO: 33671 - DNA, 20 bp, synthetic construct
  misc_feature 1..20: note = Description of Artificial Sequence: Synthetic oligonucleotide
  misc_feature 1..20: note = Target: FXN; (+) strand; PAM type: YTN; PAM sequence: TTA
  source 1..20: mol_type = other DNA
caggtgtgagccaccgcgcc

SEQ ID NO: 33672 - DNA, 20 bp, synthetic construct
  misc_feature 1..20: note = Description of Artificial Sequence: Synthetic oligonucleotide
  misc_feature 1..20: note = Target: FXN; (+) strand; PAM type: YTN; PAM sequence: CTG
  source 1..20: mol_type = other DNA
gctcctcaaagatgttaatc

SEQ ID NO: 33673 - DNA, 20 bp, synthetic construct
  misc_feature 1..20: note = Description of Artificial Sequence: Synthetic oligonucleotide
  misc_feature 1..20: note = Target: FXN; (+) strand; PAM type: YTN; PAM sequence: CTC
  source 1..20: mol_type = other DNA
ctcaaagatgttaatcctct

SEQ ID NO: 33674 - DNA, 20 bp, synthetic construct
  misc_feature 1..20: note = Description of Artificial Sequence: Synthetic oligonucleotide
  misc_feature 1..20: note = Target: FXN; (+) strand; PAM type: YTN; PAM sequence: CTC
  source 1..20: mol_type = other DNA
aaagatgttaatcctcttga

SEQ ID NO: 33675 - DNA, 20 bp, synthetic construct
  misc_feature 1..20: note = Description of Artificial Sequence: Synthetic oligonucleotide
  misc_feature 1..20: note = Target: FXN; (+) strand; PAM type: YTN; PAM sequence: TTA
  source 1..20: mol_type = other DNA
atcctcttgatggcaattga

SEQ ID NO: 33676 - DNA, 20 bp, synthetic construct
  misc_feature 1..20: note = Description of Artificial Sequence: Synthetic oligonucleotide
  misc_feature 1..20: note = Target: FXN; (+) strand; PAM type: YTN; PAM sequence: CTC
  source 1..20: mol_type = other DNA
ttgatggcaattgactaata

SEQ ID NO: 33677 - DNA, 20 bp, synthetic construct
  misc_feature 1..20: note = Description of Artificial Sequence: Synthetic oligonucleotide
  misc_feature 1..20: note = Target: FXN; (+) strand; PAM type: YTN; PAM sequence: CTT
  source 1..20: mol_type = other DNA
gatggcaattgactaatacc

SEQ ID NO: 33678 - DNA, 20 bp, synthetic construct
  misc_feature 1..20: note = Description of Artificial Sequence: Synthetic oligonucleotide
  misc_feature 1..20: note = Target: FXN; (+) strand; PAM type: YTN; PAM sequence: TTG
  source 1..20: mol_type = other DNA
atggcaattgactaatacca

SEQ ID NO: 33679 - DNA, 20 bp, synthetic construct
  misc_feature 1..20: note = Description of Artificial Sequence: Synthetic oligonucleotide
  misc_feature 1..20: note = Target: FXN; (+) strand; PAM type: YTN; PAM sequence: TTG
  source 1..20: mol_type = other DNA
actaataccagaaaatgtca

SEQ ID NO: 33680 - DNA, 20 bp, synthetic construct
  misc_feature 1..20: note = Description of Artificial Sequence: Synthetic oligonucleotide
  misc_feature 1..20: note = Target: FXN; (+) strand; PAM type: YTN; PAM sequence: CTA
  source 1..20: mol_type = other DNA
ataccagaaaatgtcacgaa

SEQ ID NO: 33681 - DNA, 20 bp, synthetic construct
  misc_feature 1..20: note = Description of Artificial Sequence: Synthetic oligonucleotide
  misc_feature 1..20: note = Target: FXN; (+) strand; PAM type: YTN; PAM sequence: TTT
  source 1..20: mol_type = other DNA
tggattcaatcatggaattg

SEQ ID NO: 33682 - DNA, 20 bp, synthetic construct
  misc_feature 1..20: note = Description of Artificial Sequence: Synthetic oligonucleotide
  misc_feature 1..20: note = Target: FXN; (+) strand; PAM type: YTN; PAM sequence: TTT
  source 1..20: mol_type = other DNA
ggattcaatcatggaattgt

SEQ ID NO: 33683 - DNA, 20 bp, synthetic construct
  misc_feature 1..20: note = Description of Artificial Sequence: Synthetic oligonucleotide
  misc_feature 1..20: note = Target: FXN; (+) strand; PAM type: YTN; PAM sequence: TTG
  source 1..20: mol_type = other DNA
gattcaatcatggaattgtt

SEQ ID NO: 33684 - DNA, 20 bp, synthetic construct
  misc_feature 1..20: note = Description of Artificial Sequence: Synthetic oligonucleotide
  misc_feature 1..20: note = Target: FXN; (+) strand; PAM type: YTN; PAM sequence: TTC
  source 1..20: mol_type = other DNA
aatcatggaattgttgagga

SEQ ID NO: 33685 - DNA, 20 bp, synthetic construct
  misc_feature 1..20: note = Description of Artificial Sequence: Synthetic oligonucleotide
  misc_feature 1..20: note = Target: FXN; (+) strand; PAM type: YTN; PAM sequence: TTG
  source 1..20: mol_type = other DNA
ttgaggacaatcagccatca

SEQ ID NO: 33686 - DNA, 20 bp, synthetic construct
  misc_feature 1..20: note = Description of Artificial Sequence: Synthetic oligonucleotide
  misc_feature 1..20: note = Target: FXN; (+) strand; PAM type: YTN; PAM sequence: TTG
  source 1..20: mol_type = other DNA
aggacaatcagccatcagac

SEQ ID NO: 33687 - DNA, 20 bp, synthetic construct
  misc_feature 1..20: note = Description of Artificial Sequence: Synthetic oligonucleotide
  misc_feature 1..20: note = Target: FXN; (+) strand; PAM type: YTN; PAM sequence: CTA
  source 1..20: mol_type = other DNA
aagcgatagaaatagtattg

SEQ ID NO: 33688 - DNA, 20 bp, synthetic construct
  misc_feature 1..20: note = Description of Artificial Sequence: Synthetic oligonucleotide
  misc_feature 1..20: note = Target: FXN; (+) strand; PAM type: YTN; PAM sequence: TTG
  source 1..20: mol_type = other DNA
gaaattgcagcgggagcact

SEQ ID NO: 33689 - DNA, 20 bp, synthetic construct
  misc_feature 1..20: note = Description of Artificial Sequence: Synthetic oligonucleotide
  misc_feature 1..20: note = Target: FXN; (+) strand; PAM type: YTN; PAM sequence: TTG
  source 1..20: mol_type = other DNA
cagcgggagcactgaatgga

SEQ ID NO: 33690 - DNA, 20 bp, synthetic construct
  misc_feature 1..20: note = Description of Artificial Sequence: Synthetic oligonucleotide
  misc_feature 1..20: note = Target: FXN; (+) strand; PAM type: YTN; PAM sequence: CTG
  source 1..20: mol_type = other DNA
aatggagaaggcactccaca

SEQ ID NO: 33691 - DNA, 20 bp, synthetic construct
  misc_feature 1..20: note = Description of Artificial Sequence: Synthetic oligonucleotide
  misc_feature 1..20: note = Target: FXN; (+) strand; PAM type: YTN; PAM sequence: CTC
  source 1..20: mol_type = other DNA
cacataatggaggaggcaac

SEQ ID NO: 33692 - DNA, 20 bp, synthetic construct
  misc_feature 1..20: note = Description of Artificial Sequence: Synthetic oligonucleotide
  misc_feature 1..20: note = Target: FXN; (+) strand; PAM type: YTN; PAM sequence: CTT
  source 1..20: mol_type = other DNA
agagaaggtatcaagcctga

SEQ ID NO: 33693 - DNA, 20 bp, synthetic construct
  misc_feature 1..20: note = Description of Artificial Sequence: Synthetic oligonucleotide
  misc_feature 1..20: note = Target: FXN; (+) strand; PAM type: YTN; PAM sequence: TTA
  source 1..20: mol_type = other DNA
gagaaggtatcaagcctgac

SEQ ID NO: 33694 - DNA, 20 bp, synthetic construct
  misc_feature 1..20: note = Description of Artificial Sequence: Synthetic oligonucleotide
  misc_feature 1..20: note = Target: FXN; (+) strand; PAM type: YTN; PAM sequence: CTG
  source 1..20: mol_type = other DNA
actataaggacagtgaggga

SEQ ID NO: 33695 - DNA, 20 bp, synthetic construct
  misc_feature 1..20: note = Description of Artificial Sequence: Synthetic oligonucleotide
  misc_feature 1..20: note = Target: FXN; (+) strand; PAM type: YTN; PAM sequence: CTA
  source 1..20: mol_type = other DNA
taaggacagtgagggaattg

SEQ ID NO: 33696 - DNA, 20 bp, synthetic construct
  misc_feature 1..20: note = Description of Artificial Sequence: Synthetic oligonucleotide
  misc_feature 1..20: note = Target: FXN; (+) strand; PAM type: YTN; PAM sequence: TTG
  source 1..20: mol_type = other DNA
aaaaaacaaaaaaggagcaa

SEQ ID NO: 33697 - DNA, 20 bp, synthetic construct
  misc_feature 1..20: note = Description of Artificial Sequence: Synthetic oligonucleotide
  misc_feature 1..20: note = Target: FXN; (+) strand; PAM type: YTN; PAM sequence: TTG
  source 1..20: mol_type = other DNA
aatgcctttcaagtagattc

SEQ ID NO: 33698 - DNA, 20 bp, synthetic construct
  misc_feature 1..20: note = Description of Artificial Sequence: Synthetic oligonucleotide
  misc_feature 1..20: note = Target: FXN; (+) strand; PAM type: YTN; PAM sequence: CTT
  source 1..20: mol_type = other DNA
tcaagtagattcagtaattg

SEQ ID NO: 33699 - DNA, 20 bp, synthetic construct
  misc_feature 1..20: note = Description of Artificial Sequence: Synthetic oligonucleotide
  misc_feature 1..20: note = Target: FXN; (+) strand; PAM type: YTN; PAM sequence: TTT
  source 1..20: mol_type = other DNA
caagtagattcagtaattgc

SEQ ID NO: 33700 - DNA, 20 bp, synthetic construct
  misc_feature 1..20: note = Description of Artificial Sequence: Synthetic oligonucleotide
  misc_feature 1..20: note = Target: FXN; (+) strand; PAM type: YTN; PAM sequence: TTC
  source 1..20: mol_type = other DNA
aagtagattcagtaattgct

SEQ ID NO: 33701 - DNA, 20 bp, synthetic construct
  misc_feature 1..20: note = Description of Artificial Sequence: Synthetic oligonucleotide
  misc_feature 1..20: note = Target: FXN; (+) strand; PAM type: YTN; PAM sequence: TTC
  source 1..20: mol_type = other DNA
agtaattgctgttagcagca

SEQ ID NO: 33702 - DNA, 20 bp, synthetic construct
  misc_feature 1..20: note = Description of Artificial Sequence: Synthetic oligonucleotide
  misc_feature 1..20: note = Target: FXN; (+) strand; PAM type: YTN; PAM sequence: TTG
  source 1..20: mol_type = other DNA
ctgttagcagcaaaaaatgc

SEQ ID NO: 33703 - DNA, 20 bp, synthetic construct
  misc_feature 1..20: note = Description of Artificial Sequence: Synthetic oligonucleotide
  misc_feature 1..20: note = Target: FXN; (+) strand; PAM type: YTN; PAM sequence: CTG
  source 1..20: mol_type = other DNA
ttagcagcaaaaaatgcagt

SEQ ID NO: 33704 - DNA, 20 bp, synthetic construct
  misc_feature 1..20: note = Description of Artificial Sequence: Synthetic oligonucleotide
  misc_feature 1..20: note = Target: FXN; (+) strand; PAM type: YTN; PAM sequence: TTA
  source 1..20: mol_type = other DNA
gcagcaaaaaatgcagtagt

SEQ ID NO: 33705 - DNA, 20 bp, synthetic construct
  misc_feature 1..20: note = Description of Artificial Sequence: Synthetic oligonucleotide
  misc_feature 1..20: note = Target: FXN; (+) strand; PAM type: YTN; PAM sequence: CTG
  source 1..20: mol_type = other DNA
ggcagggctttaaagtgctt

SEQ ID NO: 33706 - DNA, 20 bp, synthetic construct
  misc_feature 1..20: note = Description of Artificial Sequence: Synthetic oligonucleotide
  misc_feature 1..20: note = Target: FXN; (+) strand; PAM type: YTN; PAM sequence: CTT
  source 1..20: mol_type = other DNA
taaagtgcttgcacaggcag

SEQ ID NO: 33707 - DNA, 20 bp, synthetic construct
  misc_feature 1..20: note = Description of Artificial Sequence: Synthetic oligonucleotide
  misc_feature 1..20: note = Target: FXN; (+) strand; PAM type: YTN; PAM sequence: TTT
  source 1..20: mol_type = other DNA
aaagtgcttgcacaggcagc

SEQ ID NO: 33708 - DNA, 20 bp, synthetic construct
  misc_feature 1..20: note = Description of Artificial Sequence: Synthetic oligonucleotide
  misc_feature 1..20: note = Target: FXN; (+) strand; PAM type: YTN; PAM sequence: TTA
  source 1..20: mol_type = other DNA
aagtgcttgcacaggcagcc

SEQ ID NO: 33709 - DNA, 20 bp, synthetic construct
  misc_feature 1..20: note = Description of Artificial Sequence: Synthetic oligonucleotide
  misc_feature 1..20: note = Target: FXN; (+) strand; PAM type: YTN; PAM sequence: CTT
  source 1..20: mol_type = other DNA
gcacaggcagccctagaggg

SEQ ID NO: 33710 - DNA, 20 bp, synthetic construct
  misc_feature 1..20: note = Description of Artificial Sequence: Synthetic oligonucleotide
  misc_feature 1..20: note = Target: FXN; (+) strand; PAM type: YTN; PAM sequence: TTG
  source 1..20: mol_type = other DNA
cacaggcagccctagagggc

SEQ ID NO: 33711 - DNA, 20 bp, synthetic construct
  misc_feature 1..20: note = Description of Artificial Sequence: Synthetic oligonucleotide
  misc_feature 1..20: note = Target: FXN; (+) strand; PAM type: YTN; PAM sequence: CTA
  source 1..20: mol_type = other DNA
gagggccgggctgcttggga

SEQ ID NO: 33712 - DNA, 20 bp, synthetic construct
  misc_feature 1..20: note = Description of Artificial Sequence: Synthetic oligonucleotide
  misc_feature 1..20: note = Target: FXN; (+) strand; PAM type: YTN; PAM sequence: CTG
  source 1..20: mol_type = other DNA
cttgggaactcttacaaact

SEQ ID NO: 33713 - DNA, 20 bp, synthetic construct
  misc_feature 1..20: note = Description of Artificial Sequence: Synthetic oligonucleotide
  misc_feature 1..20: note = Target: FXN; (+) strand; PAM type: YTN; PAM sequence: CTT
  source 1..20: mol_type = other DNA
gggaactcttacaaactgac

SEQ ID NO: 33714 - DNA, 20 bp, synthetic construct
  misc_feature 1..20: note = Description of Artificial Sequence: Synthetic oligonucleotide
  misc_feature 1..20: note = Target: FXN; (+) strand; PAM type: YTN; PAM sequence: TTG
  source 1..20: mol_type = other DNA
ggaactcttacaaactgacc

SEQ ID NO: 33715 - DNA, 20 bp, synthetic construct
  misc_feature 1..20: note = Description of Artificial Sequence: Synthetic oligonucleotide
  misc_feature 1..20: note = Target: FXN; (+) strand; PAM type: YTN; PAM sequence: CTC
  source 1..20: mol_type = other DNA
ttacaaactgacctaccaac

SEQ ID NO: 33716 - DNA, 20 bp, synthetic construct
  misc_feature 1..20: note = Description of Artificial Sequence: Synthetic oligonucleotide
  misc_feature 1..20: note = Target: FXN; (+) strand; PAM type: YTN; PAM sequence: CTT
  source 1..20: mol_type = other DNA
acaaactgacctaccaactt

SEQ ID NO: 33717 - DNA, 20 bp, synthetic construct
  misc_feature 1..20: note = Description of Artificial Sequence: Synthetic oligonucleotide
  misc_feature 1..20: note = Target: FXN; (+) strand; PAM type: YTN; PAM sequence: TTA
  source 1..20: mol_type = other DNA
caaactgacctaccaacttg

SEQ ID NO: 33718 - DNA, 20 bp, synthetic construct
  misc_feature 1..20: note = Description of Artificial Sequence: Synthetic oligonucleotide
  misc_feature 1..20: note = Target: FXN; (+) strand; PAM type: YTN; PAM sequence: CTG
  source 1..20: mol_type = other DNA
acctaccaacttgagcatcc

SEQ ID NO: 33719 - DNA, 20 bp, synthetic construct
  misc_feature 1..20: note = Description of Artificial Sequence: Synthetic oligonucleotide
  misc_feature 1..20: note = Target: FXN; (+) strand; PAM type: YTN; PAM sequence: CTA
  source 1..20: mol_type = other DNA
ccaacttgagcatccacagc

SEQ ID NO: 33720 - DNA, 20 bp, synthetic construct
  misc_feature 1..20: note = Description of Artificial Sequence: Synthetic oligonucleotide
  misc_feature 1..20: note = Target: FXN; (+) strand; PAM type: YTN; PAM sequence: CTT
  source 1..20: mol_type = other DNA
gagcatccacagcctgatca

SEQ ID NO: 33721 - DNA, 20 bp, synthetic construct
  misc_feature 1..20: note = Description of Artificial Sequence: Synthetic oligonucleotide
  misc_feature 1..20: note = Target: FXN; (+) strand; PAM type: YTN; PAM sequence: TTG
  source 1..20: mol_type = other DNA
agcatccacagcctgatcag

SEQ ID NO: 33722 - DNA, 20 bp, synthetic construct
  misc_feature 1..20: note = Description of Artificial Sequence: Synthetic oligonucleotide
  misc_feature 1..20: note = Target: FXN; (+) strand; PAM type: YTN; PAM sequence: CTG
  source 1..20: mol_type = other DNA
atcagaggtgggggagttaa

SEQ ID NO: 33723 - DNA, 20 bp, synthetic construct
  misc_feature 1..20: note = Description of Artificial Sequence: Synthetic oligonucleotide
  misc_feature 1..20: note = Target: FXN; (+) strand; PAM type: YTN; PAM sequence: TTA
  source 1..20: mol_type = other DNA
agggccttctctcccctagc

SEQ ID NO: 33724 - DNA, 20 bp, synthetic construct
  misc_feature 1..20: note = Description of Artificial Sequence: Synthetic oligonucleotide
  misc_feature 1..20: note = Target: FXN; (+) strand; PAM type: YTN; PAM sequence: CTT
  source 1..20: mol_type = other DNA
ctctcccctagcctctacta

SEQ ID NO: 33725 - DNA, 20 bp, synthetic construct
  misc_feature 1..20: note = Description of Artificial Sequence: Synthetic oligonucleotide
  misc_feature 1..20: note = Target: FXN; (+) strand; PAM type: YTN; PAM sequence: TTC
  source 1..20: mol_type = other DNA
tctcccctagcctctactag

SEQ ID NO: 33726 - DNA, 20 bp, synthetic construct
  misc_feature 1..20: note = Description of Artificial Sequence: Synthetic oligonucleotide
  misc_feature 1..20: note = Target: FXN; (+) strand; PAM type: YTN; PAM sequence: CTC
  source 1..20: mol_type = other DNA
tcccctagcctctactagag

SEQ ID NO: 33727 - DNA, 20 bp, synthetic construct
  misc_feature 1..20: note = Description of Artificial Sequence: Synthetic oligonucleotide
  misc_feature 1..20: note = Target: FXN; (+) strand; PAM type: YTN; PAM sequence: CTC
  source 1..20: mol_type = other DNA
ccctagcctctactagagcc

SEQ ID NO: 33728 - DNA, 20 bp, synthetic construct
  misc_feature 1..20: note = Description of Artificial Sequence: Synthetic oligonucleotide
  misc_feature 1..20: note = Target: FXN; (+) strand; PAM type: YTN; PAM sequence: CTA
  source 1..20: mol_type = other DNA
gcctctactagagcctgtaa

SEQ ID NO: 33729 - DNA, 20 bp, synthetic construct
  misc_feature 1..20: note = Description of Artificial Sequence: Synthetic oligonucleotide
  misc_feature 1..20: note = Target: FXN; (+) strand; PAM type: YTN; PAM sequence: CTC
  source 1..20: mol_type = other DNA
tactagagcctgtaactgca

SEQ ID NO: 33730 - DNA, 20 bp, synthetic construct
  misc_feature 1..20: note = Description of Artificial Sequence: Synthetic oligonucleotide
  misc_feature 1..20: note = Target: FXN; (+) strand; PAM type: YTN; PAM sequence: CTA
  source 1..20: mol_type = other DNA
ctagagcctgtaactgcagg

SEQ ID NO: 33731 - DNA, 20 bp, synthetic construct
  misc_feature 1..20: note = Description of Artificial Sequence: Synthetic oligonucleotide
  misc_feature 1..20: note = Target: FXN; (+) strand; PAM type: YTN; PAM sequence: CTA
  source 1..20: mol_type = other DNA
gagcctgtaactgcagggaa

SEQ ID NO: 33732 - DNA, 20 bp, synthetic construct
  misc_feature 1..20: note = Description of Artificial Sequence: Synthetic oligonucleotide
  misc_feature 1..20: note = Target: FXN; (+) strand; PAM type: YTN; PAM sequence: CTG
  source 1..20: mol_type = other DNA
taactgcagggaaaccaagt

SEQ ID NO: 33733 - DNA, 20 bp, synthetic construct
  misc_feature 1..20: note = Description of Artificial Sequence: Synthetic oligonucleotide
  misc_feature 1..20: note = Target: FXN; (+) strand; PAM type: YTN; PAM sequence: CTG
  source 1..20: mol_type = other DNA
cagggaaaccaagttgcagg

SEQ ID NO: 33734 - DNA, 20 bp, synthetic construct
  misc_feature 1..20: note = Description of Artificial Sequence: Synthetic oligonucleotide
  misc_feature 1..20: note = Target: FXN; (+) strand; PAM type: YTN; PAM sequence: TTG
  source 1..20: mol_type = other DNA
caggctaaactctgcccaca

SEQ ID NO: 33735 - DNA, 20 bp, synthetic construct
  misc_feature 1..20: note = Description of Artificial Sequence: Synthetic oligonucleotide
  misc_feature 1..20: note = Target: FXN; (+) strand; PAM type: YTN; PAM sequence: CTA
  source 1..20: mol_type = other DNA
aactctgcccacacatgcag

SEQ ID NO: 33736 - DNA, 20 bp, synthetic construct
  misc_feature 1..20: note = Description of Artificial Sequence: Synthetic oligonucleotide
  misc_feature 1..20: note = Target: FXN; (+) strand; PAM type: YTN; PAM sequence: CTC
  source 1..20: mol_type = other DNA
tgcccacacatgcagacatt

SEQ ID NO: 33737 - DNA, 20 bp, synthetic construct
  misc_feature 1..20: note = Description of Artificial Sequence: Synthetic oligonucleotide
  misc_feature 1..20: note = Target: FXN; (+) strand; PAM type: YTN; PAM sequence: CTG
  source 1..20: mol_type = other DNA
cccacacatgcagacattga

SEQ ID NO: 33738 - DNA, 20 bp, synthetic construct
  misc_feature 1..20: note = Description of Artificial Sequence: Synthetic oligonucleotide
  misc_feature 1..20: note = Target: FXN; (+) strand; PAM type: YTN; PAM sequence: TTG
  source 1..20: mol_type = other DNA
attagcaagctacaaaaaca

SEQ ID NO: 33739 - DNA, 20 bp, synthetic construct
  misc_feature 1..20: note = Description of Artificial Sequence: Synthetic oligonucleotide
  misc_feature 1..20: note = Target: FXN; (+) strand; PAM type: YTN; PAM sequence: TTA
  source 1..20: mol_type = other DNA
gcaagctacaaaaacagtca

SEQ ID NO: 33740 - DNA, 20 bp, synthetic construct
  misc_feature 1..20: note = Description of Artificial Sequence: Synthetic oligonucleotide
  misc_feature 1..20: note = Target: FXN; (+) strand; PAM type: YTN; PAM sequence: CTA
  source 1..20: mol_type = other DNA
caaaaacagtcatgaaacct

SEQ ID NO: 33741 - DNA, 20 bp, synthetic construct
  misc_feature 1..20: note = Description of Artificial Sequence: Synthetic oligonucleotide
  misc_feature 1..20: note = Target: FXN; (+) strand; PAM type: YTN; PAM sequence: CTG
  source 1..20: mol_type = other DNA
tttttataggattagtgaag

SEQ ID NO: 33742 - DNA, 20 bp, synthetic construct
  misc_feature 1..20: note = Description of Artificial Sequence: Synthetic oligonucleotide
  misc_feature 1..20: note = Target: FXN; (+) strand; PAM type: YTN; PAM sequence: TTT
  source 1..20: mol_type = other DNA
ttataggattagtgaagccc

SEQ ID NO: 33743 - DNA, 20 bp, synthetic construct
  misc_feature 1..20: note = Description of Artificial Sequence: Synthetic oligonucleotide
  misc_feature 1..20: note = Target: FXN; (+) strand; PAM type: YTN; PAM sequence: TTT
  source 1..20: mol_type = other DNA
tataggattagtgaagcccc

SEQ ID NO: 33744 - DNA, 20 bp, synthetic construct
  misc_feature 1..20: note = Description of Artificial Sequence: Synthetic oligonucleotide
  misc_feature 1..20: note = Target: FXN; (+) strand; PAM type: YTN; PAM sequence: TTT
  source 1..20: mol_type = other DNA
ataggattagtgaagcccca

SEQ ID NO: 33745 - DNA, 20 bp, synthetic construct
  misc_feature 1..20: note = Description of Artificial Sequence: Synthetic oligonucleotide
  misc_feature 1..20: note = Target: FXN; (+) strand; PAM type: YTN; PAM sequence: TTA
  source 1..20: mol_type = other DNA
taggattagtgaagccccag

SEQ ID NO: 33746 - DNA, 20 bp, synthetic construct
  misc_feature 1..20: note = Description of Artificial Sequence: Synthetic oligonucleotide
  misc_feature 1..20: note = Target: FXN; (+) strand; PAM type: YTN; PAM sequence: TTA
  source 1..20: mol_type = other DNA
gtgaagccccagtttgacca

SEQ ID NO: 33747 - DNA, 20 bp, synthetic construct
  misc_feature 1..20: note = Description of Artificial Sequence: Synthetic oligonucleotide
  misc_feature 1..20: note = Target: FXN; (+) strand; PAM type: YTN; PAM sequence: TTT
  source 1..20: mol_type = other DNA
gaccagagtactttgcatga

SEQ ID NO: 33748 - DNA, 20 bp, synthetic construct
  misc_feature 1..20: note = Description of Artificial Sequence: Synthetic oligonucleotide
  misc_feature 1..20: note = Target: FXN; (+) strand; PAM type: YTN; PAM sequence: TTG
  source 1..20: mol_type = other DNA
accagagtactttgcatgaa

SEQ ID NO: 33749 - DNA, 20 bp, synthetic construct
  misc_feature 1..20: note = Description of Artificial Sequence: Synthetic oligonucleotide
  misc_feature 1..20: note = Target: FXN; (+) strand; PAM type: YTN; PAM sequence: CTT
  source 1..20: mol_type = other DNA
tgcatgaatgttttgttaga

SEQ ID NO: 33750 - DNA, 20 bp, synthetic construct
  misc_feature 1..20: note = Description of Artificial Sequence: Synthetic oligonucleotide
  misc_feature 1..20: note = Target: FXN; (+) strand; PAM type: YTN; PAM sequence: TTT
  source 1..20: mol_type = other DNA
gcatgaatgttttgttagaa

SEQ ID NO: 33751 - DNA, 20 bp, synthetic construct
  misc_feature 1..20: note = Description of Artificial Sequence: Synthetic oligonucleotide
  misc_feature 1..20: note = Target: FXN; (+) strand; PAM type: YTN; PAM sequence: TTG
  source 1..20: mol_type = other DNA
catgaatgttttgttagaag

SEQ ID NO: 33752 - DNA, 20 bp, synthetic construct
  misc_feature 1..20: note = Description of Artificial Sequence: Synthetic oligonucleotide
  misc_feature 1..20: note = Target: FXN; (+) strand; PAM type: YTN; PAM sequence: TTT
  source 1..20: mol_type = other DNA
tgttagaagcaaatgtgcca

SEQ ID NO: 33753 - DNA, 20 bp, synthetic construct
  misc_feature 1..20: note = Description of Artificial Sequence: Synthetic oligonucleotide
  misc_feature 1..20: note = Target: FXN; (+) strand; PAM type: YTN; PAM sequence: TTT
  source 1..20: mol_type = other DNA
gttagaagcaaatgtgccaa

SEQ ID NO: 33754 - DNA, 20 bp, synthetic construct
  misc_feature 1..20: note = Description of Artificial Sequence: Synthetic oligonucleotide
  misc_feature 1..20: note = Target: FXN; (+) strand; PAM type: YTN; PAM sequence: TTG
  source 1..20: mol_type = other DNA
ttagaagcaaatgtgccaat

SEQ ID NO: 33755 - DNA, 20 bp, synthetic construct
  misc_feature 1..20: note = Description of Artificial Sequence: Synthetic oligonucleotide
  misc_feature 1..20: note = Target: FXN; (+) strand; PAM type: YTN; PAM sequence: TTA
  source 1..20: mol_type = other DNA
gaagcaaatgtgccaatatt

SEQ ID NO: 33756 - DNA, 20 bp, synthetic construct
  misc_feature 1..20: note = Description of Artificial Sequence: Synthetic oligonucleotide
  misc_feature 1..20: note = Target: FXN; (+) strand; PAM type: YTN; PAM sequence: TTC
  source 1..20: mol_type = other DNA
tagcagctgcgtttggttta

SEQ ID NO: 33757 - DNA, 20 bp, synthetic construct
  misc_feature 1..20: note = Description of Artificial Sequence: Synthetic oligonucleotide
  misc_feature 1..20: note = Target: FXN; (+) strand; PAM type: YTN; PAM sequence: CTA
  source 1..20: mol_type = other DNA
gcagctgcgtttggtttact

SEQ ID NO: 33758 - DNA, 20 bp, synthetic construct
  misc_feature 1..20: note = Description of Artificial Sequence: Synthetic oligonucleotide
  misc_feature 1..20: note = Target: FXN; (+) strand; PAM type: YTN; PAM sequence: CTG
  source 1..20: mol_type = other DNA
cgtttggtttacttcttctt

SEQ ID NO: 33759 - DNA, 20 bp, synthetic construct
  misc_feature 1..20: note = Description of Artificial Sequence: Synthetic oligonucleotide
  misc_feature 1..20: note = Target: FXN; (+) strand; PAM type: YTN; PAM sequence: TTT
  source 1..20: mol_type = other DNA
ggtttacttcttcttcttct

SEQ ID NO: 33760 - DNA, 20 bp, synthetic construct
  misc_feature 1..20: note = Description of Artificial Sequence: Synthetic oligonucleotide
  misc_feature 1..20: note = Target: FXN; (+) strand; PAM type: YTN; PAM sequence: TTG
  source 1..20: mol_type = other DNA
gtttacttcttcttcttctt

SEQ ID NO: 33761 - DNA, 20 bp, synthetic construct
  misc_feature 1..20: note = Description of Artificial Sequence: Synthetic oligonucleotide
  misc_feature 1..20: note = Target: FXN; (+) strand; PAM type: YTN; PAM sequence: TTT
  source 1..20: mol_type = other DNA
acttcttcttcttctttttt

SEQ ID NO: 33762 - DNA, 20 bp, synthetic construct
  misc_feature 1..20: note = Description of Artificial Sequence: Synthetic oligonucleotide
  misc_feature 1..20: note = Target: FXN; (+) strand; PAM type: YTN; PAM sequence: TTA
  source 1..20: mol_type = other DNA
cttcttcttcttcttttttt

SEQ ID NO: 33763 - DNA, 20 bp, synthetic construct
  misc_feature 1..20: note = Description of Artificial Sequence: Synthetic oligonucleotide
  misc_feature 1..20: note = Target: FXN; (+) strand; PAM type: YTN; PAM sequence: CTT
  source 1..20: mol_type = other DNA
cttcttcttctttttttttt

SEQ ID NO: 33764 - DNA, 20 bp, synthetic construct
  misc_feature 1..20: note = Description of Artificial Sequence: Synthetic oligonucleotide
  misc_feature 1..20: note = Target: FXN; (+) strand; PAM type: YTN; PAM sequence: TTC
  source 1..20: mol_type = other DNA
ttcttcttcttttttttttt

SEQ ID NO: 33765 - DNA, 20 bp, synthetic construct
  misc_feature 1..20: note = Description of Artificial Sequence: Synthetic oligonucleotide
  misc_feature 1..20: note = Target: FXN; (+) strand; PAM type: YTN; PAM sequence: CTT
  source 1..20: mol_type = other DNA
cttcttcttttttttttttt

SEQ ID NO: 33766 - DNA, 20 bp, synthetic construct
  misc_feature 1..20: note = Description of Artificial Sequence: Synthetic oligonucleotide
  misc_feature 1..20: note = Target: FXN; (+) strand; PAM type: YTN; PAM sequence: TTC
  source 1..20: mol_type = other DNA
ttcttctttttttttttttt

SEQ ID NO: 33767 - DNA, 20 bp, synthetic construct
  misc_feature 1..20: note = Description of Artificial Sequence: Synthetic oligonucleotide
  misc_feature 1..20: note = Target: FXN; (+) strand; PAM type: YTN; PAM sequence: CTT
  source 1..20: mol_type = other DNA
cttctttttttttttttttg

SEQ ID NO: 33768 - DNA, 20 bp, synthetic construct
  misc_feature 1..20: note = Description of Artificial Sequence: Synthetic oligonucleotide
  misc_feature 1..20: note = Target: FXN; (+) strand; PAM type: YTN; PAM sequence: TTC
  source 1..20: mol_type = other DNA
ttctttttttttttttttga

SEQ ID NO: 33769 - DNA, 20 bp, synthetic construct
  misc_feature 1..20: note = Description of Artificial Sequence: Synthetic oligonucleotide
  misc_feature 1..20: note = Target: FXN; (+) strand; PAM type: YTN; PAM sequence: CTT
  source 1..20: mol_type = other DNA
ctttttttttttttttgagt

SEQ ID NO: 33770 - DNA, 20 bp, synthetic construct
  misc_feature 1..20: note = Description of Artificial Sequence: Synthetic oligonucleotide
  misc_feature 1..20: note = Target: FXN; (+) strand; PAM type: YTN; PAM sequence: TTC
  source 1..20: mol_type = other DNA
tttttttttttttttgagtt

SEQ ID NO: 33771 - DNA, 20 bp, synthetic construct
  misc_feature 1..20: note = Description of Artificial Sequence: Synthetic oligonucleotide
  misc_feature 1..20: note = Target: FXN; (+) strand; PAM type: YTN; PAM sequence: CTT
  source 1..20: mol_type = other DNA
tttttttttttttgagttga

SEQ ID NO: 33772 - DNA, 20 bp, synthetic construct
  misc_feature 1..20: note = Description of Artificial Sequence: Synthetic oligonucleotide
  misc_feature 1..20: note = Target: FXN; (+) strand; PAM type: YTN; PAM sequence: TTT
  source 1..20: mol_type = other DNA
ttttttttttttgagttgaa

SEQ ID NO: 33773 - DNA, 20 bp, synthetic construct
  misc_feature 1..20: note = Description of Artificial Sequence: Synthetic oligonucleotide
  misc_feature 1..20: note = Target: FXN; (+) strand; PAM type: YTN; PAM sequence: TTT
  source 1..20: mol_type = other DNA
tttttttttttgagttgaag

SEQ ID NO: 33774 - DNA, 20 bp, synthetic construct
  misc_feature 1..20: note = Description of Artificial Sequence: Synthetic oligonucleotide
  misc_feature 1..20: note = Target: FXN; (+) strand; PAM type: YTN; PAM sequence: TTT
  source 1..20: mol_type = other DNA
ttttttttttgagttgaagc

SEQ ID NO: 33775 - DNA, 20 bp, synthetic construct
  misc_feature 1..20: note = Description of Artificial Sequence: Synthetic oligonucleotide
  misc_feature 1..20: note = Target: FXN; (+) strand; PAM type: YTN; PAM sequence: TTT
  source 1..20: mol_type = other DNA
tttttttttgagttgaagcc

SEQ ID NO: 33776 - DNA, 20 bp, synthetic construct
  misc_feature 1..20: note = Description of Artificial Sequence: Synthetic oligonucleotide
  misc_feature 1..20: note = Target: FXN; (+) strand; PAM type: YTN; PAM sequence: TTT
  source 1..20: mol_type = other DNA
ttttttttgagttgaagcct

SEQ ID NO: 33777 - DNA, 20 bp, synthetic construct
  misc_feature 1..20: note = Description of Artificial Sequence: Synthetic oligonucleotide
  misc_feature 1..20: note = Target: FXN; (+) strand; PAM type: YTN; PAM sequence: TTT
  source 1..20: mol_type = other DNA
tttttttgagttgaagccta

SEQ ID NO: 33778 - DNA, 20 bp, synthetic construct
  misc_feature 1..20: note = Description of Artificial Sequence: Synthetic oligonucleotide
  misc_feature 1..20: note = Target: FXN; (+) strand; PAM type: YTN; PAM sequence: TTT
  source 1..20: mol_type = other DNA
ttttttgagttgaagcctag

SEQ ID NO: 33779 - DNA, 20 bp, synthetic construct
  misc_feature 1..20: note = Description of Artificial Sequence: Synthetic oligonucleotide
  misc_feature 1..20: note = Target: FXN; (+) strand; PAM type: YTN; PAM sequence: TTT
  source 1..20: mol_type = other DNA
tttttgagttgaagcctagc

SEQ ID NO: 33780 - DNA, 20 bp, synthetic construct
  misc_feature 1..20: note = Description of Artificial Sequence: Synthetic oligonucleotide
  misc_feature 1..20: note = Target: FXN; (+) strand; PAM type: YTN; PAM sequence: TTT
  source 1..20: mol_type = other DNA
ttttgagttgaagcctagct

SEQ ID NO: 33781 - DNA, 20 bp, synthetic construct
  misc_feature 1..20: note = Description of Artificial Sequence: Synthetic oligonucleotide
  misc_feature 1..20: note = Target: FXN; (+) strand; PAM type: YTN; PAM sequence: TTT
  source 1..20: mol_type = other DNA
tttgagttgaagcctagctc

SEQ ID NO: 33782 - DNA, 20 bp, synthetic construct
  misc_feature 1..20: note = Description of Artificial Sequence: Synthetic oligonucleotide
  misc_feature 1..20: note = Target: FXN; (+) strand; PAM type: YTN; PAM sequence: TTT
  source 1..20: mol_type = other DNA
ttgagttgaagcctagctct

SEQ ID NO: 33783 - DNA, 20 bp, synthetic construct
  misc_feature 1..20: note = Description of Artificial Sequence: Synthetic oligonucleotide
  misc_feature 1..20: note = Target: FXN; (+) strand; PAM type: YTN; PAM sequence: TTT
  source 1..20: mol_type = other DNA
tgagttgaagcctagctctg

SEQ ID NO: 33784 - DNA, 20 bp, synthetic construct
  misc_feature 1..20: note = Description of Artificial Sequence: Synthetic oligonucleotide
  misc_feature 1..20: note = Target: FXN; (+) strand; PAM type: YTN; PAM sequence: TTT
  source 1..20: mol_type = other DNA
gagttgaagcctagctctgt

SEQ ID NO: 33785 - DNA, 20 bp, synthetic construct
  misc_feature 1..20: note = Description of Artificial Sequence: Synthetic oligonucleotide
  misc_feature 1..20: note = Target: FXN; (+) strand; PAM type: YTN; PAM sequence: TTG
  source 1..20: mol_type = other DNA
agttgaagcctagctctgtc

SEQ ID NO: 33786 - DNA, 20 bp, synthetic construct
  misc_feature 1..20: note = Description of Artificial Sequence: Synthetic oligonucleotide
  misc_feature 1..20: note = Target: FXN; (+) strand; PAM type: YTN; PAM sequence: TTG
  source 1..20: mol_type = other DNA
aagcctagctctgtcaccca

SEQ ID NO: 33787 - DNA, 20 bp, synthetic construct
  misc_feature 1..20: note = Description of Artificial Sequence: Synthetic oligonucleotide
  misc_feature 1..20: note = Target: FXN; (+) strand; PAM type: YTN; PAM sequence: CTA
  source 1..20: mol_type = other DNA
gctctgtcacccaggctgga

SEQ ID NO: 33788 - DNA, 20 bp, synthetic construct
  misc_feature 1..20: note = Description of Artificial Sequence: Synthetic oligonucleotide
  misc_feature 1..20: note = Target: FXN; (+) strand; PAM type: YTN; PAM sequence: CTC
  source 1..20: mol_type = other DNA
tgtcacccaggctggagtgc

SEQ ID NO: 33789 - DNA, 20 bp, synthetic construct
  misc_feature 1..20: note = Description of Artificial Sequence: Synthetic oligonucleotide
  misc_feature 1..20: note = Target: FXN; (+) strand; PAM type: YTN; PAM sequence: CTG
  source 1..20: mol_type = other DNA
tcacccaggctggagtgcag

SEQ ID NO: 33790 - DNA, 20 bp, synthetic construct
  misc_feature 1..20: note = Description of Artificial Sequence: Synthetic oligonucleotide
  misc_feature 1..20: note = Target: FXN; (+) strand; PAM type: YTN; PAM sequence: CTG
  source 1..20: mol_type = other DNA
gagtgcagttgtgtgatctc

SEQ ID NO: 33791 - DNA, 20 bp, synthetic construct
  misc_feature 1..20: note = Description of Artificial Sequence: Synthetic oligonucleotide
  misc_feature 1..20: note = Target: FXN; (+) strand; PAM type: YTN; PAM sequence: TTG
  source 1..20: mol_type = other DNA
tgtgatctcagctcactgca

SEQ ID NO: 33792 - DNA, 20 bp, synthetic construct
  misc_feature 1..20: note = Description of Artificial Sequence: Synthetic oligonucleotide
  misc_feature 1..20: note = Target: FXN; (+) strand; PAM type: YTN; PAM sequence: CTC
  source 1..20: mol_type = other DNA
agctcactgcaacctctgcc

SEQ ID NO: 33793 - DNA, 20 bp, synthetic construct
  misc_feature 1..20: note = Description of Artificial Sequence: Synthetic oligonucleotide
  misc_feature 1..20: note = Target: FXN; (+) strand; PAM type: YTN; PAM sequence: CTC
  source 1..20: mol_type = other DNA
actgcaacctctgcctccca

SEQ ID NO: 33794 - DNA, 20 bp, synthetic construct
  misc_feature 1..20: note = Description of Artificial Sequence: Synthetic oligonucleotide
  misc_feature 1..20: note = Target: FXN; (+) strand; PAM type: YTN; PAM sequence: CTG
  source 1..20: mol_type = other DNA
caacctctgcctcccaggtt

SEQ ID NO: 33795 - DNA, 20 bp, synthetic construct
  misc_feature 1..20: note = Description of Artificial Sequence: Synthetic oligonucleotide
  misc_feature 1..20: note = Target: FXN; (+) strand; PAM type: YTN; PAM sequence: CTC
  source 1..20: mol_type = other DNA
tgcctcccaggttcaagcga

SEQ ID NO: 33796 - DNA, 20 bp, synthetic construct
  misc_feature 1..20: note = Description of Artificial Sequence: Synthetic oligonucleotide
  misc_feature 1..20: note = Target: FXN; (+) strand; PAM type: YTN; PAM sequence: CTG
  source 1..20: mol_type = other DNA
cctcccaggttcaagcgatt

SEQ ID NO: 33797 - DNA, 20 bp, synthetic construct
  misc_feature 1..20: note = Description of Artificial Sequence: Synthetic oligonucleotide
  misc_feature 1..20: note = Target: FXN; (+) strand; PAM type: YTN; PAM sequence: CTC
  source 1..20: mol_type = other DNA
ccaggttcaagcgattctcc

SEQ ID NO: 33798 - DNA, 20 bp, synthetic construct
  misc_feature 1..20: note = Description of Artificial Sequence: Synthetic oligonucleotide
  misc_feature 1..20: note = Target: FXN; (+) strand; PAM type: YTN; PAM sequence: TTC
  source 1..20: mol_type = other DNA
aagcgattctcccgcctcaa

SEQ ID NO: 33799 - DNA, 20 bp, synthetic construct
  misc_feature 1..20: note = Description of Artificial Sequence: Synthetic oligonucleotide
  misc_feature 1..20: note = Target: FXN; (+) strand; PAM type: YTN; PAM sequence: TTC
  source 1..20: mol_type = other DNA
tcccgcctcaacctcctgag

SEQ ID NO: 33800 - DNA, 20 bp, synthetic construct
  misc_feature 1..20: note = Description of Artificial Sequence: Synthetic oligonucleotide
  misc_feature 1..20: note = Target: FXN; (+) strand; PAM type: YTN; PAM sequence: CTC
  source 1..20: mol_type = other DNA
ccgcctcaacctcctgagta

SEQ ID NO: 33801 - DNA, 20 bp, synthetic construct
  misc_feature 1..20: note = Description of Artificial Sequence: Synthetic oligonucleotide
  misc_feature 1..20: note = Target: FXN; (+) strand; PAM type: YTN; PAM sequence: CTC
  source 1..20: mol_type = other DNA
aacctcctgagtagctggga

SEQ ID NO: 33802 - DNA, 20 bp, synthetic construct
  misc_feature 1..20: note = Description of Artificial Sequence: Synthetic oligonucleotide
  misc_feature 1..20: note = Target: FXN; (+) strand; PAM type: YTN; PAM sequence: CTC
  source 1..20: mol_type = other DNA
ctgagtagctgggattacag

SEQ ID NO: 33803 - DNA, 20 bp, synthetic construct
  misc_feature 1..20: note = Description of Artificial Sequence: Synthetic oligonucleotide
  misc_feature 1..20: note = Target: FXN; (+) strand; PAM type: YTN; PAM sequence: CTG
  source 1..20: mol_type = other DNA
agtagctgggattacagaca

SEQ ID NO: 33804 - DNA, 20 bp, synthetic construct
  misc_feature 1..20: note = Description of Artificial Sequence: Synthetic oligonucleotide
  misc_feature 1..20: note = Target: FXN; (+) strand; PAM type: YTN; PAM sequence: CTG
  source 1..20: mol_type = other DNA
ggattacagacatgtaccac

SEQ ID NO: 33805 - DNA, 20 bp, synthetic construct
  misc_feature 1..20: note = Description of Artificial Sequence: Synthetic oligonucleotide
  misc_feature 1..20: note = Target: FXN; (+) strand; PAM type: YTN; PAM sequence: TTA
  source 1..20: mol_type = other DNA
cagacatgtaccacaataca

SEQ ID NO: 33806 - DNA, 20 bp, synthetic construct
  misc_feature 1..20: note = Description of Artificial Sequence: Synthetic oligonucleotide
  misc_feature 1..20: note = Target: FXN; (+) strand; PAM type: YTN; PAM sequence: CTA
  source 1..20: mol_type = other DNA
agttttgtatttttagtaga

SEQ ID NO: 33807 - DNA, 20 bp, synthetic construct
  misc_feature 1..20: note = Description of Artificial Sequence: Synthetic oligonucleotide
  misc_feature 1..20: note = Target: FXN; (+) strand; PAM type: YTN; PAM sequence: TTT
  source 1..20: mol_type = other DNA
tgtatttttagtagaaatgg

SEQ ID NO: 33808 - DNA, 20 bp, synthetic construct
  misc_feature 1..20: note = Description of Artificial Sequence: Synthetic oligonucleotide
  misc_feature 1..20: note = Target: FXN; (+) strand; PAM type: YTN; PAM sequence: TTT
  source 1..20: mol_type = other DNA
gtatttttagtagaaatggg

SEQ ID NO: 33809 - DNA, 20 bp, synthetic construct
  misc_feature 1..20: note = Description of Artificial Sequence: Synthetic oligonucleotide
  misc_feature 1..20: note = Target: FXN; (+) strand; PAM type: YTN; PAM sequence: TTG
  source 1..20: mol_type = other DNA
tatttttagtagaaatgggg

SEQ ID NO: 33810 - DNA, 20 bp, synthetic construct
  misc_feature 1..20: note = Description of Artificial Sequence: Synthetic oligonucleotide
  misc_feature 1..20: note = Target: FXN; (+) strand; PAM type: YTN; PAM sequence: TTT
  source 1..20: mol_type = other DNA
ttagtagaaatggggtttca

SEQ ID NO: 33811 - DNA, 20 bp, synthetic construct
  misc_feature 1..20: note = Description of Artificial Sequence: Synthetic oligonucleotide
  misc_feature 1..20: note = Target: FXN; (+) strand; PAM type: YTN; PAM sequence: TTT
  source 1..20: mol_type = other DNA
tagtagaaatggggtttcac

SEQ ID NO: 33812 - DNA, 20 bp, synthetic construct
  misc_feature 1..20: note = Description of Artificial Sequence: Synthetic oligonucleotide
  misc_feature 1..20: note = Target: FXN; (+) strand; PAM type: YTN; PAM sequence: TTT
  source 1..20: mol_type = other DNA
agtagaaatggggtttcacc

SEQ ID NO: 33813 - DNA, 20 bp, synthetic construct
  misc_feature 1..20: note = Description of Artificial Sequence: Synthetic oligonucleotide
  misc_feature 1..20: note = Target: FXN; (+) strand; PAM type: YTN; PAM sequence: TTA
  source 1..20: mol_type = other DNA
gtagaaatggggtttcacca

SEQ ID NO: 33814 - DNA, 20 bp, synthetic construct
  misc_feature 1..20: note = Description of Artificial Sequence: Synthetic oligonucleotide
  misc_feature 1..20: note = Target: FXN; (+) strand; PAM type: YTN; PAM sequence: TTT
  source 1..20: mol_type = other DNA
caccatgttggccaggctgg

SEQ ID NO: 33815 - DNA, 20 bp, synthetic construct
  misc_feature 1..20: note = Description of Artificial Sequence: Synthetic oligonucleotide
  misc_feature 1..20: note = Target: FXN; (+) strand; PAM type: YTN; PAM sequence: TTC
  source 1..20: mol_type = other DNA
accatgttggccaggctggt

SEQ ID NO: 33816 - DNA, 20 bp, synthetic construct
  misc_feature 1..20: note = Description of Artificial Sequence: Synthetic oligonucleotide
  misc_feature 1..20: note = Target: FXN; (+) strand; PAM type: YTN; PAM sequence: TTG
  source 1..20: mol_type = other DNA
gccaggctggtctcaaactc

SEQ ID NO: 33817 - DNA, 20 bp, synthetic construct
  misc_feature 1..20: note = Description of Artificial Sequence: Synthetic oligonucleotide
  misc_feature 1..20: note = Target: FXN; (+) strand; PAM type: YTN; PAM sequence: CTG
  source 1..20: mol_type = other DNA
gtctcaaactcctgatctca

SEQ ID NO: 33818 - DNA, 20 bp, synthetic construct
  misc_feature 1..20: note = Description of Artificial Sequence: Synthetic oligonucleotide
  misc_feature 1..20: note = Target: FXN; (+) strand; PAM type: YTN; PAM sequence: CTC
  source 1..20: mol_type = other DNA
aaactcctgatctcaagtga

SEQ ID NO: 33819 - DNA, 20 bp, synthetic construct
  misc_feature 1..20: note = Description of Artificial Sequence: Synthetic oligonucleotide
  misc_feature 1..20: note = Target: FXN; (+) strand; PAM type: YTN; PAM sequence: CTC
  source 1..20: mol_type = other DNA
ctgatctcaagtgatccacc

SEQ ID NO: 33820 - DNA, 20 bp, synthetic construct
  misc_feature 1..20: note = Description of Artificial Sequence: Synthetic oligonucleotide
  misc_feature 1..20: note = Target: FXN; (+) strand; PAM type: YTN; PAM sequence: CTG
  source 1..20: mol_type = other DNA
atctcaagtgatccacccgc

SEQ ID NO: 33821 - DNA, 20 bp, synthetic construct
  misc_feature 1..20: note = Description of Artificial Sequence: Synthetic oligonucleotide
  misc_feature 1..20: note = Target: FXN; (+) strand; PAM type: YTN; PAM sequence: CTC
  source 1..20: mol_type = other DNA
aagtgatccacccgcctcag

SEQ ID NO: 33822 - DNA, 20 bp, synthetic construct
  misc_feature 1..20: note = Description of Artificial Sequence: Synthetic oligonucleotide
  misc_feature 1..20: note = Target: FXN; (+) strand; PAM type: YTN; PAM sequence: CTC
  source 1..20: mol_type = other DNA
agcctcctaaagtgctgggt

SEQ ID NO: 33823 - DNA, 20 bp, synthetic construct
  misc_feature 1..20: note = Description of Artificial Sequence: Synthetic oligonucleotide
  misc_feature 1..20: note = Target: FXN; (+) strand; PAM type: YTN; PAM sequence: CTC
  source 1..20: mol_type = other DNA
ctaaagtgctgggttaacag

SEQ ID NO: 33824 - DNA, 20 bp, synthetic construct
  misc_feature 1..20: note = Description of Artificial Sequence: Synthetic oligonucleotide
  misc_feature 1..20: note = Target: FXN; (+) strand; PAM type: YTN; PAM sequence: CTA
  source 1..20: mol_type = other DNA
aagtgctgggttaacaggca

SEQ ID NO: 33825 - DNA, 20 bp, synthetic construct
  misc_feature 1..20: note = Description of Artificial Sequence: Synthetic oligonucleotide
  misc_feature 1..20: note = Target: FXN; (+) strand; PAM type: YTN; PAM sequence: CTG
  source 1..20: mol_type = other DNA
ggttaacaggcatgagccac

SEQ ID NO: 33826 - DNA, 20 bp, synthetic construct
  misc_feature 1..20: note = Description of Artificial Sequence: Synthetic oligonucleotide
  misc_feature 1..20: note = Target: FXN; (+) strand; PAM type: YTN; PAM sequence: TTA
  source 1..20: mol_type = other DNA
acaggcatgagccacggcac

SEQ ID NO: 33827 - DNA, 20 bp, synthetic construct
  misc_feature 1..20: note = Description of Artificial Sequence: Synthetic oligonucleotide
  misc_feature 1..20: note = Target: FXN; (+) strand; PAM type: YTN; PAM sequence: CTG
  source 1..20: mol_type = other DNA
gcaaaagtcatcttttggtt

SEQ ID NO: 33828 - DNA, 20 bp, synthetic construct
  misc_feature 1..20: note = Description of Artificial Sequence: Synthetic oligonucleotide
  misc_feature 1..20: note = Target: FXN; (+) strand; PAM type: YTN; PAM sequence: CTT
  source 1..20: mol_type = other DNA
ttggtttacttctattgaac

SEQ ID NO: 33829 - DNA, 20 bp, synthetic construct
  misc_feature 1..20: note = Description of Artificial Sequence: Synthetic oligonucleotide
  misc_feature 1..20: note = Target: FXN; (+) strand; PAM type: YTN; PAM sequence: TTT
  source 1..20: mol_type = other DNA
tggtttacttctattgaact

SEQ ID NO: 33830 - DNA, 20 bp, synthetic construct
  misc_feature 1..20: note = Description of Artificial Sequence: Synthetic oligonucleotide
  misc_feature 1..20: note = Target: FXN; (+) strand; PAM type: YTN; PAM sequence: TTT
  source 1..20: mol_type = other DNA
ggtttacttctattgaactg

SEQ ID NO: 33831 - DNA, 20 bp, synthetic construct
  misc_feature 1..20: note = Description of Artificial Sequence: Synthetic oligonucleotide
  misc_feature 1..20: note = Target: FXN; (+) strand; PAM type: YTN; PAM sequence: TTG
  source 1..20: mol_type = other DNA
gtttacttctattgaactga

SEQ ID NO: 33832 - DNA, 20 bp, synthetic construct
  misc_feature 1..20: note = Description of Artificial Sequence: Synthetic oligonucleotide
  misc_feature 1..20: note = Target: FXN; (+) strand; PAM type: YTN; PAM sequence: TTT
  source 1..20: mol_type = other DNA
acttctattgaactgaaaaa

SEQ ID NO: 33833 - DNA, 20 bp, synthetic construct
  misc_feature 1..20: note = Description of Artificial Sequence: Synthetic oligonucleotide
  misc_feature 1..20: note = Target: FXN; (+) strand; PAM type: YTN; PAM sequence: TTA
  source 1..20: mol_type = other DNA
cttctattgaactgaaaaag

SEQ ID NO: 33834 - DNA, 20 bp, synthetic construct
  misc_feature 1..20: note = Description of Artificial Sequence: Synthetic oligonucleotide
  misc_feature 1..20: note = Target: FXN; (+) strand; PAM type: YTN; PAM sequence: CTT
  source 1..20: mol_type = other DNA
ctattgaactgaaaaagtca

SEQ ID NO: 33835 - DNA, 20 bp, synthetic construct
  misc_feature 1..20: note = Description of Artificial Sequence: Synthetic oligonucleotide
  misc_feature 1..20: note = Target: FXN; (+) strand; PAM type: YTN; PAM sequence: TTC
  source 1..20: mol_type = other DNA
tattgaactgaaaaagtcac

SEQ ID NO: 33836 - DNA, 20 bp, synthetic construct
  misc_feature 1..20: note = Description of Artificial Sequence: Synthetic oligonucleotide
  misc_feature 1..20: note = Target: FXN; (+) strand; PAM type: YTN; PAM sequence: CTA
  source 1..20: mol_type = other DNA
ttgaactgaaaaagtcacaa

SEQ ID NO: 33837 - DNA, 20 bp, synthetic construct
  misc_feature 1..20: note = Description of Artificial Sequence: Synthetic oligonucleotide
  misc_feature 1..20: note = Target: FXN; (+) strand; PAM type: YTN; PAM sequence: TTG
  source 1..20: mol_type = other DNA
aactgaaaaagtcacaaata

SEQ ID NO: 33838 - DNA, 20 bp, synthetic construct
  misc_feature 1..20: note = Description of Artificial Sequence: Synthetic oligonucleotide
  misc_feature 1..20: note = Target: FXN; (+) strand; PAM type: YTN; PAM sequence: CTG
  source 1..20: mol_type = other DNA
aaaaagtcacaaatatattt

SEQ ID NO: 33839 - DNA, 20 bp, synthetic construct
  misc_feature 1..20: note = Description of Artificial Sequence: Synthetic oligonucleotide
  misc_feature 1..20: note = Target: FXN; (+) strand; PAM type: YTN; PAM sequence: TTT
  source 1..20: mol_type = other DNA
atatttaattaaatatattt

SEQ ID NO: 33840 - DNA, 20 bp, synthetic construct
  misc_feature 1..20: note = Description of Artificial Sequence: Synthetic oligonucleotide
  misc_feature 1..20: note = Target: FXN; (+) strand; PAM type: YTN; PAM sequence: TTA
  source 1..20: mol_type = other DNA
tatttaattaaatatattta

SEQ ID NO: 33841 - DNA, 20 bp, synthetic construct
  misc_feature 1..20: note = Description of Artificial Sequence: Synthetic oligonucleotide
  misc_feature 1..20: note = Target: FXN; (+) strand; PAM type: YTN; PAM sequence: TTT
  source 1..20: mol_type = other DNA
aattaaatatatttatataa

SEQ ID NO: 33842 - DNA, 20 bp, synthetic construct
  misc_feature 1..20: note = Description of Artificial Sequence: Synthetic oligonucleotide
  misc_feature 1..20: note = Target: FXN; (+) strand; PAM type: YTN; PAM sequence: TTA
  source 1..20: mol_type = other DNA
attaaatatatttatataaa

SEQ ID NO: 33843 - DNA, 20 bp, synthetic construct
  misc_feature 1..20: note = Description of Artificial Sequence: Synthetic oligonucleotide
  misc_feature 1..20: note = Target: FXN; (+) strand; PAM type: YTN; PAM sequence: TTA
  source 1..20: mol_type = other DNA
aatatatttatataaaaata

SEQ ID NO: 33844 - DNA, 20 bp, synthetic construct
  misc_feature 1..20: note = Description of Artificial Sequence: Synthetic oligonucleotide
  misc_feature 1..20: note = Target: FXN; (+) strand; PAM type: YTN; PAM sequence: TTT
  source 1..20: mol_type = other DNA
atataaaaatatggtattta

SEQ ID NO: 33845 - DNA, 20 bp, synthetic construct
  misc_feature 1..20: note = Description of Artificial Sequence: Synthetic oligonucleotide
  misc_feature 1..20: note = Target: FXN; (+) strand; PAM type: YTN; PAM sequence: TTA
  source 1..20: mol_type = other DNA
tataaaaatatggtatttag

SEQ ID NO: 33846 - DNA, 20 bp, synthetic construct
  misc_feature 1..20: note = Description of Artificial Sequence: Synthetic oligonucleotide
  misc_feature 1..20: note = Target: FXN; (+) strand; PAM type: YTN; PAM sequence: TTT
  source 1..20: mol_type = other DNA
agtattattatttttagaga

SEQ ID NO: 33847 - DNA, 20 bp, synthetic construct
  misc_feature 1..20: note = Description of Artificial Sequence: Synthetic oligonucleotide
  misc_feature 1..20: note = Target: FXN; (+) strand; PAM type: YTN; PAM sequence: TTA
  source 1..20: mol_type = other DNA
gtattattatttttagagac

SEQ ID NO: 33848 - DNA, 20 bp, synthetic construct
  misc_feature 1..20: note = Description of Artificial Sequence: Synthetic oligonucleotide
  misc_feature 1..20: note = Target: FXN; (+) strand; PAM type: YTN; PAM sequence: TTA
  source 1..20: mol_type = other DNA
ttatttttagagacagggcc

SEQ ID NO: 33849 - DNA, 20 bp, synthetic construct
  misc_feature 1..20: note = Description of Artificial Sequence: Synthetic oligonucleotide
  misc_feature 1..20: note = Target: FXN; (+) strand; PAM type: YTN; PAM sequence: TTA
  source 1..20: mol_type = other DNA
tttttagagacagggcctcg

SEQ ID NO: 33850 - DNA, 20 bp, synthetic construct
  misc_feature 1..20: note = Description of Artificial Sequence: Synthetic oligonucleotide
  misc_feature 1..20: note = Target: FXN; (+) strand; PAM type: YTN; PAM sequence: TTT
  source 1..20: mol_type = other DNA
ttagagacagggcctcgctc

SEQ ID NO: 33851 - DNA, 20 bp, synthetic construct
  misc_feature 1..20: note = Description of Artificial Sequence: Synthetic oligonucleotide
  misc_feature 1..20: note = Target: FXN; (+) strand; PAM type: YTN; PAM sequence: TTT
  source 1..20: mol_type = other DNA
tagagacagggcctcgctct

SEQ ID NO: 33852 - DNA, 20 bp, synthetic construct
  misc_feature 1..20: note = Description of Artificial Sequence: Synthetic oligonucleotide
  misc_feature 1..20: note = Target: FXN; (+) strand; PAM type: YTN; PAM sequence: TTT
  source 1..20: mol_type = other DNA
agagacagggcctcgctctg

SEQ ID NO: 33853 - DNA, 20 bp, synthetic construct
  misc_feature 1..20: note = Description of Artificial Sequence: Synthetic oligonucleotide
  misc_feature 1..20: note = Target: FXN; (+) strand; PAM type: YTN; PAM sequence: TTA
  source 1..20: mol_type = other DNA
gagacagggcctcgctctgt

SEQ ID NO: 33854 - DNA, 20 bp, synthetic construct
  misc_feature 1..20: note = Description of Artificial Sequence: Synthetic oligonucleotide
  misc_feature 1..20: note = Target: FXN; (+) strand; PAM type: YTN; PAM sequence: CTC
  source 1..20: mol_type = other DNA
gctctgtcacccaggctgga

SEQ ID NO: 33855 - DNA, 20 bp, synthetic construct
  misc_feature 1..20: note = Description of Artificial Sequence: Synthetic oligonucleotide
  misc_feature 1..20: note = Target: FXN; (+) strand; PAM type: YTN; PAM sequence: CTC
  source 1..20: mol_type = other DNA
tgtcacccaggctggagtgc

SEQ ID NO: 33856 - DNA, 20 bp, synthetic construct
  misc_feature 1..20: note = Description of Artificial Sequence: Synthetic oligonucleotide
  misc_feature 1..20: note = Target: FXN; (+) strand; PAM type: YTN; PAM sequence: CTG
  source 1..20: mol_type = other DNA
tcacccaggctggagtgcag

SEQ ID NO: 33857 - DNA, 20 bp, synthetic construct
  misc_feature 1..20: note = Description of Artificial Sequence: Synthetic oligonucleotide
  misc_feature 1..20: note = Target: FXN; (+) strand; PAM type: YTN; PAM sequence: CTG
  source 1..20: mol_type = other DNA
gagtgcagtggcacaatcat

SEQ ID NO: 33858 - DNA, 20 bp, synthetic construct
  misc_feature 1..20: note = Description of Artificial Sequence: Synthetic oligonucleotide
  misc_feature 1..20: note = Target: FXN; (+) strand; PAM type: YTN; PAM sequence: CTC
  source 1..20: mol_type = other DNA
actgcagcctcaagcttctg

SEQ ID NO: 33859 - DNA, 20 bp, synthetic construct
  misc_feature 1..20: note = Description of Artificial Sequence: Synthetic oligonucleotide
  misc_feature 1..20: note = Target: FXN; (+) strand; PAM type: YTN; PAM sequence: CTG
  source 1..20: mol_type = other DNA
cagcctcaagcttctgggct

SEQ ID NO: 33860 - DNA, 20 bp, synthetic construct
  misc_feature 1..20: note = Description of Artificial Sequence: Synthetic oligonucleotide
  misc_feature 1..20: note = Target: FXN; (+) strand; PAM type: YTN; PAM sequence: CTC
  source 1..20: mol_type = other DNA
aagcttctgggctcaagtga

SEQ ID NO: 33861 - DNA, 20 bp, synthetic construct
  misc_feature 1..20: note = Description of Artificial Sequence: Synthetic oligonucleotide
  misc_feature 1..20: note = Target: FXN; (+) strand; PAM type: YTN; PAM sequence: CTT
  source 1..20: mol_type = other DNA
ctgggctcaagtgatcgttc

SEQ ID NO: 33862 - DNA, 20 bp, synthetic construct
  misc_feature 1..20: note = Description of Artificial Sequence: Synthetic oligonucleotide
  misc_feature 1..20: note = Target: FXN; (+) strand; PAM type: YTN; PAM sequence: TTC
  source 1..20: mol_type = other DNA
tgggctcaagtgatcgttcc

SEQ ID NO: 33863 - DNA, 20 bp, synthetic construct
  misc_feature 1..20: note = Description of Artificial Sequence: Synthetic oligonucleotide
  misc_feature 1..20: note = Target: FXN; (+) strand; PAM type: YTN; PAM sequence: CTG
  source 1..20: mol_type = other DNA
ggctcaagtgatcgttccac

SEQ ID NO: 33864 - DNA, 20 bp, synthetic construct
  misc_feature 1..20: note = Description of Artificial Sequence: Synthetic oligonucleotide
  misc_feature 1..20: note = Target: FXN; (+) strand; PAM type: YTN; PAM sequence: CTC
  source 1..20: mol_type = other DNA
aagtgatcgttccacctcag

SEQ ID NO: 33865 - DNA, 20 bp, synthetic construct
  misc_feature 1..20: note = Description of Artificial Sequence: Synthetic oligonucleotide
  misc_feature 1..20: note = Target: FXN; (+) strand; PAM type: YTN; PAM sequence: TTC
  source 1..20: mol_type = other DNA
cacctcagcctccctagtag

SEQ ID NO: 33866 - DNA, 20 bp, synthetic construct
  misc_feature 1..20: note = Description of Artificial Sequence: Synthetic oligonucleotide
  misc_feature 1..20: note = Target: FXN; (+) strand; PAM type: YTN; PAM sequence: CTC
  source 1..20: mol_type = other DNA
agcctccctagtagctggga

SEQ ID NO: 33867 - DNA, 20 bp, synthetic construct
  misc_feature 1..20: note = Description of Artificial Sequence: Synthetic oligonucleotide
  misc_feature 1..20: note = Target: FXN; (+) strand; PAM type: YTN; PAM sequence: CTC
  source 1..20: mol_type = other DNA
cctagtagctgggactacag

SEQ ID NO: 33868 - DNA, 20 bp, synthetic construct
  misc_feature 1..20: note = Description of Artificial Sequence: Synthetic oligonucleotide
  misc_feature 1..20: note = Target: FXN; (+) strand; PAM type: YTN; PAM sequence: CTA
  source 1..20: mol_type = other DNA
gtagctgggactacaggcac

SEQ ID NO: 33869 - DNA, 20 bp, synthetic construct
  misc_feature 1..20: note = Description of Artificial Sequence: Synthetic oligonucleotide
  misc_feature 1..20: note = Target: FXN; (+) strand; PAM type: YTN; PAM sequence: CTG
  source 1..20: mol_type = other DNA
ggactacaggcacatgccac

SEQ ID NO: 33870 - DNA, 20 bp, synthetic construct
  misc_feature 1..20: note = Description of Artificial Sequence: Synthetic oligonucleotide
  misc_feature 1..20: note = Target: FXN; (+) strand; PAM type: YTN; PAM sequence: CTA
  source 1..20: mol_type = other DNA
caggcacatgccaccatact

SEQ ID NO: 33871 - DNA, 20 bp, synthetic construct
  misc_feature 1..20: note = Description of Artificial Sequence: Synthetic oligonucleotide
  misc_feature 1..20: note = Target: FXN; (+) strand; PAM type: YTN; PAM sequence: CTC
  source 1..20: mol_type = other DNA
ggctaattattttattttat

SEQ ID NO: 33872 - DNA, 20 bp, synthetic construct
  misc_feature 1..20: note = Description of Artificial Sequence: Synthetic oligonucleotide
  misc_feature 1..20: note = Target: FXN; (+) strand; PAM type: YTN; PAM sequence: CTA
  source 1..20: mol_type = other DNA
attattttattttatttatg

SEQ ID NO: 33873 - DNA, 20 bp, synthetic construct
  misc_feature 1..20: note = Description of Artificial Sequence: Synthetic oligonucleotide
  misc_feature 1..20: note = Target: FXN; (+) strand; PAM type: YTN; PAM sequence: TTA
  source 1..20: mol_type = other DNA
ttttattttatttatgggtc

SEQ ID NO: 33874 - DNA, 20 bp, synthetic construct
  misc_feature 1..20: note = Description of Artificial Sequence: Synthetic oligonucleotide
  misc_feature 1..20: note = Target: FXN; (+) strand; PAM type: YTN; PAM sequence: TTT
  source 1..20: mol_type = other DNA
tattttatttatgggtctcg

SEQ ID NO: 33875 - DNA, 20 bp, synthetic construct
  misc_feature 1..20: note = Description of Artificial Sequence: Synthetic oligonucleotide
  misc_feature 1..20: note = Target: FXN; (+) strand; PAM type: YTN; PAM sequence: TTT
  source 1..20: mol_type = other DNA
attttatttatgggtctcgc

SEQ ID NO: 33876 - DNA, 20 bp, synthetic construct
  misc_feature 1..20: note = Description of Artificial Sequence: Synthetic oligonucleotide
  misc_feature 1..20: note = Target: FXN; (+) strand; PAM type: YTN; PAM sequence: TTA
  source 1..20: mol_type = other DNA
ttttatttatgggtctcgct

SEQ ID NO: 33877 - DNA, 20 bp, synthetic construct
  misc_feature 1..20: note = Description of Artificial Sequence: Synthetic oligonucleotide
  misc_feature 1..20: note = Target: FXN; (+) strand; PAM type: YTN; PAM sequence: TTT
  source 1..20: mol_type = other DNA
tatttatgggtctcgctatg

SEQ ID NO: 33878 - DNA, 20 bp, synthetic construct
  misc_feature 1..20: note = Description of Artificial Sequence: Synthetic oligonucleotide
  misc_feature 1..20: note = Target: FXN; (+) strand; PAM type: YTN; PAM sequence: TTT
  source 1..20: mol_type = other DNA
atttatgggtctcgctatgt

SEQ ID NO: 33879 - DNA, 20 bp, synthetic construct
  misc_feature 1..20: note = Description of Artificial Sequence: Synthetic oligonucleotide
  misc_feature 1..20: note = Target: FXN; (+) strand; PAM type: YTN; PAM sequence: TTA
  source 1..20: mol_type = other DNA
tttatgggtctcgctatgtt

SEQ ID NO: 33880 - DNA, 20 bp, synthetic construct
  misc_feature 1..20: note = Description of Artificial Sequence: Synthetic oligonucleotide
  misc_feature 1..20: note = Target: FXN; (+) strand; PAM type: YTN; PAM sequence: TTT
  source 1..20: mol_type = other DNA
atgggtctcgctatgtttcc

SEQ ID NO: 33881 - DNA, 20 bp, synthetic construct
  misc_feature 1..20: note = Description of Artificial Sequence: Synthetic oligonucleotide
  misc_feature 1..20: note = Target: FXN; (+) strand; PAM type: YTN; PAM sequence: TTA
  source 1..20: mol_type = other DNA
tgggtctcgctatgtttccc

SEQ ID NO: 33882 - DNA, 20 bp, synthetic construct
  misc_feature 1..20: note = Description of Artificial Sequence: Synthetic oligonucleotide
  misc_feature 1..20: note = Target: FXN; (+) strand; PAM type: YTN; PAM sequence: CTC
  source 1..20: mol_type = other DNA
gctatgtttcccaggctggt

SEQ ID NO: 33883 - DNA, 20 bp, synthetic construct
  misc_feature 1..20: note = Description of Artificial Sequence: Synthetic oligonucleotide
  misc_feature 1..20: note = Target: FXN; (+) strand; PAM type: YTN; PAM sequence: CTA
  source 1..20: mol_type = other DNA
tgtttcccaggctggtctca

SEQ ID NO: 33884 - DNA, 20 bp, synthetic construct
  misc_feature 1..20: note = Description of Artificial Sequence: Synthetic oligonucleotide
  misc_feature 1..20: note = Target: FXN; (+) strand; PAM type: YTN; PAM sequence: TTT
  source 1..20: mol_type = other DNA
cccaggctggtctcaaactc

SEQ ID NO: 33885 - DNA, 20 bp, synthetic construct
  misc_feature 1..20: note = Description of Artificial Sequence: Synthetic oligonucleotide
  misc_feature 1..20: note = Target: FXN; (+) strand; PAM type: YTN; PAM sequence: TTC
  source 1..20: mol_type = other DNA
ccaggctggtctcaaactcc

SEQ ID NO: 33886 - DNA, 20 bp, synthetic construct
  misc_feature 1..20: note = Description of Artificial Sequence: Synthetic oligonucleotide
  misc_feature 1..20: note = Target: FXN; (+) strand; PAM type: YTN; PAM sequence: CTG
  source 1..20: mol_type = other DNA
gtctcaaactcctggcctca

SEQ ID NO: 33887 - DNA, 20 bp, synthetic construct
  misc_feature 1..20: note = Description of Artificial Sequence: Synthetic oligonucleotide
  misc_feature 1..20: note = Target: FXN; (+) strand; PAM type: YTN; PAM sequence: CTC
  source 1..20: mol_type = other DNA
aaactcctggcctcaagcga

SEQ ID NO: 33888 - DNA, 20 bp, synthetic construct
  misc_feature 1..20: note = Description of Artificial Sequence: Synthetic oligonucleotide
  misc_feature 1..20: note = Target: FXN; (+) strand; PAM type: YTN; PAM sequence: CTC
  source 1..20: mol_type = other DNA
ctggcctcaagcgattctct

SEQ ID NO: 33889 - DNA, 20 bp, synthetic construct
  misc_feature 1..20: note = Description of Artificial Sequence: Synthetic oligonucleotide
  misc_feature 1..20: note = Target: FXN; (+) strand; PAM type: YTN; PAM sequence: CTG
  source 1..20: mol_type = other DNA
gcctcaagcgattctctcac

SEQ ID NO: 33890 - DNA, 20 bp, synthetic construct
  misc_feature 1..20: note = Description of Artificial Sequence: Synthetic oligonucleotide
  misc_feature 1..20: note = Target: FXN; (+) strand; PAM type: YTN; PAM sequence: CTC
  source 1..20: mol_type = other DNA
aagcgattctctcacctcgg

SEQ ID NO: 33891 - DNA, 20 bp, synthetic construct
  misc_feature 1..20: note = Description of Artificial Sequence: Synthetic oligonucleotide
  misc_feature 1..20: note = Target: FXN; (+) strand; PAM type: YTN; PAM sequence: TTC
  source 1..20: mol_type = other DNA
tctcacctcggcctcccaaa

SEQ ID NO: 33892 - DNA, 20 bp, synthetic construct
  misc_feature 1..20: note = Description of Artificial Sequence: Synthetic oligonucleotide
  misc_feature 1..20: note = Target: FXN; (+) strand; PAM type: YTN; PAM sequence: CTC
  source 1..20: mol_type = other DNA
tcacctcggcctcccaaagc

SEQ ID NO: 33893 - DNA, 20 bp, synthetic construct
  misc_feature 1..20: note = Description of Artificial Sequence: Synthetic oligonucleotide
  misc_feature 1..20: note = Target: FXN; (+) strand; PAM type: YTN; PAM sequence: CTC
  source 1..20: mol_type = other DNA
acctcggcctcccaaagcac

SEQ ID NO: 33894 - DNA, 20 bp, synthetic construct
  misc_feature 1..20: note = Description of Artificial Sequence: Synthetic oligonucleotide
  misc_feature 1..20: note = Target: FXN; (+) strand; PAM type: YTN; PAM sequence: CTC
  source 1..20: mol_type = other DNA
ggcctcccaaagcaccggga

SEQ ID NO: 33895 - DNA, 20 bp, synthetic construct
  misc_feature 1..20: note = Description of Artificial Sequence: Synthetic oligonucleotide
  misc_feature 1..20: note = Target: FXN; (+) strand; PAM type: YTN; PAM sequence: CTC
  source 1..20: mol_type = other DNA
ccaaagcaccgggattacag

SEQ ID NO: 33896 - DNA, 20 bp, synthetic construct
  misc_feature 1..20: note = Description of Artificial Sequence: Synthetic oligonucleotide
  misc_feature 1..20: note = Target: FXN; (+) strand; PAM type: YTN; PAM sequence: TTA
  source 1..20: mol_type = other DNA
caggtgtgtgccagcacacc

SEQ ID NO: 33897 - DNA, 20 bp, synthetic construct
  misc_feature 1..20: note = Description of Artificial Sequence: Synthetic oligonucleotide
  misc_feature 1..20: note = Target: FXN; (+) strand; PAM type: YTN; PAM sequence: CTA
  source 1..20: mol_type = other DNA
taaatttagaaaggaggact

SEQ ID NO: 33898 - DNA, 20 bp, synthetic construct
  misc_feature 1..20: note = Description of Artificial Sequence: Synthetic oligonucleotide
  misc_feature 1..20: note = Target: FXN; (+) strand; PAM type: YTN; PAM sequence: TTT
  source 1..20: mol_type = other DNA
agaaaggaggactatttcta

SEQ ID NO: 33899 - DNA, 20 bp, synthetic construct
  misc_feature 1..20: note = Description of Artificial Sequence: Synthetic oligonucleotide
  misc_feature 1..20: note = Target: FXN; (+) strand; PAM type: YTN; PAM sequence: TTA
  source 1..20: mol_type = other DNA
gaaaggaggactatttctaa

SEQ ID NO: 33900 - DNA, 20 bp, synthetic construct
  misc_feature 1..20: note = Description of Artificial Sequence: Synthetic oligonucleotide
  misc_feature 1..20: note = Target: FXN; (+) strand; PAM type: YTN; PAM sequence: CTA
  source 1..20: mol_type = other DNA
tttctaaagagggtcccact

SEQ ID NO: 33901 - DNA, 20 bp, synthetic construct
  misc_feature 1..20: note = Description of Artificial Sequence: Synthetic oligonucleotide
  misc_feature 1..20: note = Target: FXN; (+) strand; PAM type: YTN; PAM sequence: TTT
  source 1..20: mol_type = other DNA
ctaaagagggtcccactacc

SEQ ID NO: 33902 - DNA, 20 bp, synthetic construct
  misc_feature 1..20: note = Description of Artificial Sequence: Synthetic oligonucleotide
  misc_feature 1..20: note = Target: FXN; (+) strand; PAM type: YTN; PAM sequence: TTC
  source 1..20: mol_type = other DNA
taaagagggtcccactacct

SEQ ID NO: 33903 - DNA, 20 bp, synthetic construct
  misc_feature 1..20: note = Description of Artificial Sequence: Synthetic oligonucleotide
  misc_feature 1..20: note = Target: FXN; (+) strand; PAM type: YTN; PAM sequence: CTA
  source 1..20: mol_type = other DNA
aagagggtcccactacctgt

SEQ ID NO: 33904 - DNA, 20 bp, synthetic construct
  misc_feature 1..20: note = Description of Artificial Sequence: Synthetic oligonucleotide
  misc_feature 1..20: note = Target: FXN; (+) strand; PAM type: YTN; PAM sequence: CTA
  source 1..20: mol_type = other DNA
cctgtaggcaggaagcagag

SEQ ID NO: 33905 - DNA, 20 bp, synthetic construct
  misc_feature 1..20: note = Description of Artificial Sequence: Synthetic oligonucleotide
  misc_feature 1..20: note = Target: FXN; (+) strand; PAM type: YTN; PAM sequence: CTG
  source 1..20: mol_type = other DNA
taggcaggaagcagagcctc

SEQ ID NO: 33906 - DNA, 20 bp, synthetic construct
  misc_feature 1..20: note = Description of Artificial Sequence: Synthetic oligonucleotide
  misc_feature 1..20: note = Target: FXN; (+) strand; PAM type: YTN; PAM sequence: CTC
  source 1..20: mol_type = other DNA
tggccataactgaaaaacaa

SEQ ID NO: 33907 - DNA, 20 bp, synthetic construct
  misc_feature 1..20: note = Description of Artificial Sequence: Synthetic oligonucleotide
  misc_feature 1..20: note = Target: FXN; (+) strand; PAM type: YTN; PAM sequence: CTG
  source 1..20: mol_type = other DNA
gccataactgaaaaacaagc

SEQ ID NO: 33908 - DNA, 20 bp, synthetic construct
  misc_feature 1..20: note = Description of Artificial Sequence: Synthetic oligonucleotide
  misc_feature 1..20: note = Target: FXN; (+) strand; PAM type: YTN; PAM sequence: CTG
  source 1..20: mol_type = other DNA
aaaaacaagcacttccaaga

SEQ ID NO: 33909 - DNA, 20 bp, synthetic construct
  misc_feature 1..20: note = Description of Artificial Sequence: Synthetic oligonucleotide
  misc_feature 1..20: note = Target: FXN; (+) strand; PAM type: YTN; PAM sequence: CTT
  source 1..20: mol_type = other DNA
ccaagaaggggcaaagggaa

SEQ ID NO: 33910 - DNA, 20 bp, synthetic construct
  misc_feature 1..20: note = Description of Artificial Sequence: Synthetic oligonucleotide
  misc_feature 1..20: note = Target: FXN; (+) strand; PAM type: YTN; PAM sequence: TTC
  source 1..20: mol_type = other DNA
caagaaggggcaaagggaac

SEQ ID NO: 33911 - DNA, 20 bp, synthetic construct
  misc_feature 1..20: note = Description of Artificial Sequence: Synthetic oligonucleotide
  misc_feature 1..20: note = Target: FXN; (+) strand; PAM type: YTN; PAM sequence: TTT
  source 1..20: mol_type = other DNA
atgctgagaggcgtagctaa

SEQ ID NO: 33912 - DNA, 20 bp, synthetic construct
  misc_feature 1..20: note = Description of Artificial Sequence: Synthetic oligonucleotide
  misc_feature 1..20: note = Target: FXN; (+) strand; PAM type: YTN; PAM sequence: TTA
  source 1..20: mol_type = other DNA
tgctgagaggcgtagctaag

SEQ ID NO: 33913 - DNA, 20 bp, synthetic construct
  misc_feature 1..20: note = Description of Artificial Sequence: Synthetic oligonucleotide
  misc_feature 1..20: note = Target: FXN; (+) strand; PAM type: YTN; PAM sequence: CTG
  source 1..20: mol_type = other DNA
agaggcgtagctaagcatac

SEQ ID NO: 33914 - DNA, 20 bp, synthetic construct
  misc_feature 1..20: note = Description of Artificial Sequence: Synthetic oligonucleotide
  misc_feature 1..20: note = Target: FXN; (+) strand; PAM type: YTN; PAM sequence: CTA
  source 1..20: mol_type = other DNA
agcatacatattcaacagat

SEQ ID NO: 33915 - DNA, 20 bp, synthetic construct
  misc_feature 1..20: note = Description of Artificial Sequence: Synthetic oligonucleotide
  misc_feature 1..20: note = Target: FXN; (+) strand; PAM type: YTN; PAM sequence: TTC
  source 1..20: mol_type = other DNA
aacagattatgggaggatct

SEQ ID NO: 33916 - DNA, 20 bp, synthetic construct
  misc_feature 1..20: note = Description of Artificial Sequence: Synthetic oligonucleotide
  misc_feature 1..20: note = Target: FXN; (+) strand; PAM type: YTN; PAM sequence: TTA
  source 1..20: mol_type = other DNA
tgggaggatctatgaatatt

SEQ ID NO: 33917 - DNA, 20 bp, synthetic construct
  misc_feature 1..20: note = Description of Artificial Sequence: Synthetic oligonucleotide
  misc_feature 1..20: note = Target: FXN; (+) strand; PAM type: YTN; PAM sequence: CTA
  source 1..20: mol_type = other DNA
tgaatattcacaaagggagg

SEQ ID NO: 33918 - DNA, 20 bp, synthetic construct
  misc_feature 1..20: note = Description of Artificial Sequence: Synthetic oligonucleotide
  misc_feature 1..20: note = Target: FXN; (+) strand; PAM type: YTN; PAM sequence: TTC
  source 1..20: mol_type = other DNA
acaaagggaggatctatgaa

SEQ ID NO: 33919 - DNA, 20 bp, synthetic construct
  misc_feature 1..20: note = Description of Artificial Sequence: Synthetic oligonucleotide
  misc_feature 1..20: note = Target: FXN; (+) strand; PAM type: YTN; PAM sequence: CTA
  source 1..20: mol_type = other DNA
tgaatatgcacacatgtgga

SEQ ID NO: 33920 - DNA, 20 bp, synthetic construct
  misc_feature 1..20: note = Description of Artificial Sequence: Synthetic oligonucleotide
  misc_feature 1..20: note = Target: FXN; (+) strand; PAM type: YTN; PAM sequence: CTA
  source 1..20: mol_type = other DNA
acgtgtgcagcatgtctccc

SEQ ID NO: 33921 - DNA, 20 bp, synthetic construct
  misc_feature 1..20: note = Description of Artificial Sequence: Synthetic oligonucleotide
  misc_feature 1..20: note = Target: FXN; (+) strand; PAM type: YTN; PAM sequence: CTC
  source 1..20: mol_type = other DNA
ccatgttcaccttaggcaga

SEQ ID NO: 33922 - DNA, 20 bp, synthetic construct
  misc_feature 1..20: note = Description of Artificial Sequence: Synthetic oligonucleotide
  misc_feature 1..20: note = Target: FXN; (+) strand; PAM type: YTN; PAM sequence: TTC
  source 1..20: mol_type = other DNA
accttaggcagaaacttaac

SEQ ID NO: 33923 - DNA, 20 bp, synthetic construct
  misc_feature 1..20: note = Description of Artificial Sequence: Synthetic oligonucleotide
  misc_feature 1..20: note = Target: FXN; (+) strand; PAM type: YTN; PAM sequence: CTT
  source 1..20: mol_type = other DNA
aggcagaaacttaacactaa

SEQ ID NO: 33924 - DNA, 20 bp, synthetic construct
  misc_feature 1..20: note = Description of Artificial Sequence: Synthetic oligonucleotide
  misc_feature 1..20: note = Target: FXN; (+) strand; PAM type: YTN; PAM sequence: TTA
  source 1..20: mol_type = other DNA
ggcagaaacttaacactaac

SEQ ID NO: 33925 - DNA, 20 bp, synthetic construct
  misc_feature 1..20: note = Description of Artificial Sequence: Synthetic oligonucleotide
  misc_feature 1..20: note = Target: FXN; (+) strand; PAM type: YTN; PAM sequence: CTT
  source 1..20: mol_type = other DNA
aacactaacatgtattacag

SEQ ID NO: 33926 - DNA, 20 bp, synthetic construct
  misc_feature 1..20: note = Description of Artificial Sequence: Synthetic oligonucleotide
  misc_feature 1..20: note = Target: FXN; (+) strand; PAM type: YTN; PAM sequence: TTA
  source 1..20: mol_type = other DNA
acactaacatgtattacagg

SEQ ID NO: 33927 - DNA, 20 bp, synthetic construct
  misc_feature 1..20: note = Description of Artificial Sequence: Synthetic oligonucleotide
  misc_feature 1..20: note = Target: FXN; (+) strand; PAM type: YTN; PAM sequence: CTA
  source 1..20: mol_type = other DNA
acatgtattacagggcaaca

SEQ ID NO: 33928 - DNA, 20 bp, synthetic construct
  misc_feature 1..20: note = Description of Artificial Sequence: Synthetic oligonucleotide
  misc_feature 1..20: note = Target: FXN; (+) strand; PAM type: YTN; PAM sequence: TTA
  source 1..20: mol_type = other DNA
cagggcaacaaaatgagact

SEQ ID NO: 33929 - DNA, 20 bp, synthetic construct
  misc_feature 1..20: note = Description of Artificial Sequence: Synthetic oligonucleotide
  misc_feature 1..20: note = Target: FXN; (+) strand; PAM type: YTN; PAM sequence: CTG
  source 1..20: mol_type = other DNA
catatctacataacctagct

SEQ ID NO: 33930 - DNA, 20 bp, synthetic construct
  misc_feature 1..20: note = Description of Artificial Sequence: Synthetic oligonucleotide
  misc_feature 1..20: note = Target: FXN; (+) strand; PAM type: YTN; PAM sequence: CTA
  source 1..20: mol_type = other DNA
cataacctagctatttggta

SEQ ID NO: 33931 - DNA, 20 bp, synthetic construct
  misc_feature 1..20: note = Description of Artificial Sequence: Synthetic oligonucleotide
  misc_feature 1..20: note = Target: FXN; (+) strand; PAM type: YTN; PAM sequence: CTA
  source 1..20: mol_type = other DNA
gctatttggtaggctgaagc

SEQ ID NO: 33932 - DNA, 20 bp, synthetic construct
  misc_feature 1..20: note = Description of Artificial Sequence: Synthetic oligonucleotide
  misc_feature 1..20: note = Target: FXN; (+) strand; PAM type: YTN; PAM sequence: CTA
  source 1..20: mol_type = other DNA
tttggtaggctgaagcagga

SEQ ID NO: 33933 - DNA, 20 bp, synthetic construct
  misc_feature 1..20: note = Description of Artificial Sequence: Synthetic oligonucleotide
  misc_feature 1..20: note = Target: FXN; (+) strand; PAM type: YTN; PAM sequence: TTT
  source 1..20: mol_type = other DNA
ggtaggctgaagcaggagca

SEQ ID NO: 33934 - DNA, 20 bp, synthetic construct
  misc_feature 1..20: note = Description of Artificial Sequence: Synthetic oligonucleotide
  misc_feature 1..20: note = Target: FXN; (+) strand; PAM type: YTN; PAM sequence: TTG
  source 1..20: mol_type = other DNA
gtaggctgaagcaggagcat

SEQ ID NO: 33935 - DNA, 20 bp, synthetic construct
  misc_feature 1..20: note = Description of Artificial Sequence: Synthetic oligonucleotide
  misc_feature 1..20: note = Target: FXN; (+) strand; PAM type: YTN; PAM sequence: CTG
  source 1..20: mol_type = other DNA
aagcaggagcatcacttaag

SEQ ID NO: 33936 - DNA, 20 bp, synthetic construct
  misc_feature 1..20: note = Description of Artificial Sequence: Synthetic oligonucleotide
  misc_feature 1..20: note = Target: FXN; (+) strand; PAM type: YTN; PAM sequence: CTT
  source 1..20: mol_type = other DNA
aagactgggagttcgaggca

SEQ ID NO: 33937 - DNA, 20 bp, synthetic construct
  misc_feature 1..20: note = Description of Artificial Sequence: Synthetic oligonucleotide
  misc_feature 1..20: note = Target: FXN; (+) strand; PAM type: YTN; PAM sequence: TTA
  source 1..20: mol_type = other DNA
agactgggagttcgaggcag

SEQ ID NO: 33938 - DNA, 20 bp, synthetic construct
  misc_feature 1..20: note = Description of Artificial Sequence: Synthetic oligonucleotide
  misc_feature 1..20: note = Target: FXN; (+) strand; PAM type: YTN; PAM sequence: CTG
  source 1..20: mol_type = other DNA
ggagttcgaggcagctgtga

SEQ ID NO: 33939 - DNA, 20 bp, synthetic construct
  misc_feature 1..20: note = Description of Artificial Sequence: Synthetic oligonucleotide
  misc_feature 1..20: note = Target: FXN; (+) strand; PAM type: YTN; PAM sequence: TTC
  source 1..20: mol_type = other DNA
gaggcagctgtgagccatga

SEQ ID NO: 33940 - DNA, 20 bp, synthetic construct
  misc_feature 1..20: note = Description of Artificial Sequence: Synthetic oligonucleotide
  misc_feature 1..20: note = Target: FXN; (+) strand; PAM type: YTN; PAM sequence: CTG
  source 1..20: mol_type = other DNA
tgagccatgatcgcaccact

SEQ ID NO: 33941 - DNA, 20 bp, synthetic construct
  misc_feature 1..20: note = Description of Artificial Sequence: Synthetic oligonucleotide
  misc_feature 1..20: note = Target: FXN; (+) strand; PAM type: YTN; PAM sequence: CTG
  source 1..20: mol_type = other DNA
ttctccagccaggatgacag

SEQ ID NO: 33942 - DNA, 20 bp, synthetic construct
  misc_feature 1..20: note = Description of Artificial Sequence: Synthetic oligonucleotide
  misc_feature 1..20: note = Target: FXN; (+) strand; PAM type: YTN; PAM sequence: TTC
  source 1..20: mol_type = other DNA
tccagccaggatgacagggc

SEQ ID NO: 33943 - DNA, 20 bp, synthetic construct
  misc_feature 1..20: note = Description of Artificial Sequence: Synthetic oligonucleotide
  misc_feature 1..20: note = Target: FXN; (+) strand; PAM type: YTN; PAM sequence: CTC
  source 1..20: mol_type = other DNA
cagccaggatgacagggcaa

SEQ ID NO: 33944 - DNA, 20 bp, synthetic construct
  misc_feature 1..20: note = Description of Artificial Sequence: Synthetic oligonucleotide
  misc_feature 1..20: note = Target: FXN; (+) strand; PAM type: YTN; PAM sequence: CTG
  source 1..20: mol_type = other DNA
tcttagaccactctgtggtc

SEQ ID NO: 33945 - DNA, 20 bp, synthetic construct
  misc_feature 1..20: note = Description of Artificial Sequence: Synthetic oligonucleotide
  misc_feature 1..20: note = Target: FXN; (+) strand; PAM type: YTN; PAM sequence: CTT
  source 1..20: mol_type = other DNA
agaccactctgtggtcagtg

SEQ ID NO: 33946 - DNA, 20 bp, synthetic construct
  misc_feature 1..20: note = Description of Artificial Sequence: Synthetic oligonucleotide
  misc_feature 1..20: note = Target: FXN; (+) strand; PAM type: YTN; PAM sequence: TTA
  source 1..20: mol_type = other DNA
gaccactctgtggtcagtgg

SEQ ID NO: 33947 - DNA, 20 bp, synthetic construct
  misc_feature 1..20: note = Description of Artificial Sequence: Synthetic oligonucleotide
  misc_feature 1..20: note = Target: FXN; (+) strand; PAM type: YTN; PAM sequence: CTC
  source 1..20: mol_type = other DNA
tgtggtcagtggttatcagg

SEQ ID NO: 33948 - DNA, 20 bp, synthetic construct
  misc_feature 1..20: note = Description of Artificial Sequence: Synthetic oligonucleotide
  misc_feature 1..20: note = Target: FXN; (+) strand; PAM type: YTN; PAM sequence: CTG
  source 1..20: mol_type = other DNA
tggtcagtggttatcaggaa

SEQ ID NO: 33949 - DNA, 20 bp, synthetic construct
  misc_feature 1..20: note = Description of Artificial Sequence: Synthetic oligonucleotide
  misc_feature 1..20: note = Target: FXN; (+) strand; PAM type: YTN; PAM sequence: TTA
  source 1..20: mol_type = other DNA
tcaggaaggaatgctagtca

SEQ ID NO: 33950 - DNA, 20 bp, synthetic construct
  misc_feature 1..20: note = Description of Artificial Sequence: Synthetic oligonucleotide
  misc_feature 1..20: note = Target: FXN; (+) strand; PAM type: YTN; PAM sequence: CTA
  source 1..20: mol_type = other DNA
gtcagttgtgctgaaaccac

SEQ ID NO: 33951 - DNA, 20 bp, synthetic construct
  misc_feature 1..20: note = Description of Artificial Sequence: Synthetic oligonucleotide
  misc_feature 1..20: note = Target: FXN; (+) strand; PAM type: YTN; PAM sequence: TTG
  source 1..20: mol_type = other DNA
tgctgaaaccactaaaaagg

SEQ ID NO: 33952 - DNA, 20 bp, synthetic construct
  misc_feature 1..20: note = Description of Artificial Sequence: Synthetic oligonucleotide
  misc_feature 1..20: note = Target: FXN; (+) strand; PAM type: YTN; PAM sequence: CTG
  source 1..20: mol_type = other DNA
aaaccactaaaaaggaaggg

SEQ ID NO: 33953 - DNA, 20 bp, synthetic construct
  misc_feature 1..20: note = Description of Artificial Sequence: Synthetic oligonucleotide
  misc_feature 1..20: note = Target: FXN; (+) strand; PAM type: YTN; PAM sequence: CTA
  source 1..20: mol_type = other DNA
aaaaggaagggcagaattag

SEQ ID NO: 33954 - DNA, 20 bp, synthetic construct
  misc_feature 1..20: note = Description of Artificial Sequence: Synthetic oligonucleotide
  misc_feature 1..20: note = Target: FXN; (+) strand; PAM type: YTN; PAM sequence: TTA
  source 1..20: mol_type = other DNA
ggtgatgagttgataccagt

SEQ ID NO: 33955 - DNA, 20 bp, synthetic construct
  misc_feature 1..20: note = Description of Artificial Sequence: Synthetic oligonucleotide
  misc_feature 1..20: note = Target: FXN; (+) strand; PAM type: YTN; PAM sequence: TTG
  source 1..20: mol_type = other DNA
ataccagtggtgaagtgagt

SEQ ID NO: 33956 - DNA, 20 bp, synthetic construct
  misc_feature 1..20: note = Description of Artificial Sequence: Synthetic oligonucleotide
  misc_feature 1..20: note = Target: FXN; (+) strand; PAM type: YTN; PAM sequence: CTT
  source 1..20: mol_type = other DNA
ttttttttttttctttttga

SEQ ID NO: 33957 - DNA, 20 bp, synthetic construct
  misc_feature 1..20: note = Description of Artificial Sequence: Synthetic oligonucleotide
  misc_feature 1..20: note = Target: FXN; (+) strand; PAM type: YTN; PAM sequence: TTT
  source 1..20: mol_type = other DNA
tttttttttttctttttgag

SEQ ID NO: 33958 - DNA, 20 bp, synthetic construct
  misc_feature 1..20: note = Description of Artificial Sequence: Synthetic oligonucleotide
  misc_feature 1..20: note = Target: FXN; (+) strand; PAM type: YTN; PAM sequence: TTT
  source 1..20: mol_type = other DNA
ttttttttttctttttgaga

SEQ ID NO: 33959 - DNA, 20 bp, synthetic construct
  misc_feature 1..20: note = Description of Artificial Sequence: Synthetic oligonucleotide
  misc_feature 1..20: note = Target: FXN; (+) strand; PAM type: YTN; PAM sequence: TTT
  source 1..20: mol_type = other DNA
tttttttttctttttgagat

SEQ ID NO: 33960 - DNA, 20 bp, synthetic construct
  misc_feature 1..20: note = Description of Artificial Sequence: Synthetic oligonucleotide
  misc_feature 1..20: note = Target: FXN; (+) strand; PAM type: YTN; PAM sequence: TTT
  source 1..20: mol_type = other DNA
ttttttttctttttgagatg

SEQ ID NO: 33961 - DNA, 20 bp, synthetic construct
  misc_feature 1..20: note = Description of Artificial Sequence: Synthetic oligonucleotide
  misc_feature 1..20: note = Target: FXN; (+) strand; PAM type: YTN; PAM sequence: TTT
  source 1..20: mol_type = other DNA
tttttttctttttgagatgg

SEQ ID NO: 33962 - DNA, 20 bp, synthetic construct
  misc_feature 1..20: note = Description of Artificial Sequence: Synthetic oligonucleotide
  misc_feature 1..20: note = Target: FXN; (+) strand; PAM type: YTN; PAM sequence: TTT
  source 1..20: mol_type = other DNA
ttttttctttttgagatgga

SEQ ID NO: 33963 - DNA, 20 bp, synthetic construct
  misc_feature 1..20: note = Description of Artificial Sequence: Synthetic oligonucleotide
  misc_feature 1..20: note = Target: FXN; (+) strand; PAM type: YTN; PAM sequence: TTT
  source 1..20: mol_type = other DNA
tttttctttttgagatggag

SEQ ID NO: 33964 - DNA, 20 bp, synthetic construct
  misc_feature 1..20: note = Description of Artificial Sequence: Synthetic oligonucleotide
  misc_feature 1..20: note = Target: FXN; (+) strand; PAM type: YTN; PAM sequence: TTT
  source 1..20: mol_type = other DNA
ttttctttttgagatggagt

SEQ ID NO: 33965 - DNA, 20 bp, synthetic construct
  misc_feature 1..20: note = Description of Artificial Sequence: Synthetic oligonucleotide
  misc_feature 1..20: note = Target: FXN; (+) strand; PAM type: YTN; PAM sequence: TTT
  source 1..20: mol_type = other DNA
tttctttttgagatggagtc

SEQ ID NO: 33966 - DNA, 20 bp, synthetic construct
  misc_feature 1..20: note = Description of Artificial Sequence: Synthetic oligonucleotide
  misc_feature 1..20: note = Target: FXN; (+) strand; PAM type: YTN; PAM sequence: TTT
  source 1..20: mol_type = other DNA
ttctttttgagatggagtct

SEQ ID NO: 33967 - DNA, 20 bp, synthetic construct
  misc_feature 1..20: note = Description of Artificial Sequence: Synthetic oligonucleotide
  misc_feature 1..20: note = Target: FXN; (+) strand; PAM type: YTN; PAM sequence: TTT
  source 1..20: mol_type = other DNA
tctttttgagatggagtctt

SEQ ID NO: 33968 - DNA, 20 bp, synthetic construct
  misc_feature 1..20: note = Description of Artificial Sequence: Synthetic oligonucleotide
  misc_feature 1..20: note = Target: FXN; (+) strand; PAM type: YTN; PAM sequence: TTT
  source 1..20: mol_type = other DNA
ctttttgagatggagtcttg

SEQ ID NO: 33969 - DNA, 20 bp, synthetic construct
  misc_feature 1..20: note = Description of Artificial Sequence: Synthetic oligonucleotide
  misc_feature 1..20: note = Target: FXN; (+) strand; PAM type: YTN; PAM sequence: TTC
  source 1..20: mol_type = other DNA
tttttgagatggagtcttgc

SEQ ID NO: 33970 - DNA, 20 bp, synthetic construct
  misc_feature 1..20: note = Description of Artificial Sequence: Synthetic oligonucleotide
  misc_feature 1..20: note = Target: FXN; (+) strand; PAM type: YTN; PAM sequence: CTT
  source 1..20: mol_type = other DNA
tttgagatggagtcttgctc

SEQ ID NO: 33971 - DNA, 20 bp, synthetic construct
  misc_feature 1..20: note = Description of Artificial Sequence: Synthetic oligonucleotide
  misc_feature 1..20: note = Target: FXN; (+) strand; PAM type: YTN; PAM sequence: TTT
  source 1..20: mol_type = other DNA
ttgagatggagtcttgctct

SEQ ID NO: 33972 - DNA, 20 bp, synthetic construct
  misc_feature 1..20: note = Description of Artificial Sequence: Synthetic oligonucleotide
  misc_feature 1..20: note = Target: FXN; (+) strand; PAM type: YTN; PAM sequence: TTT
  source 1..20: mol_type = other DNA
tgagatggagtcttgctctg

SEQ ID NO: 33973 - DNA, 20 bp, synthetic construct
  misc_feature 1..20: note = Description of Artificial Sequence: Synthetic oligonucleotide
  misc_feature 1..20: note = Target: FXN; (+) strand; PAM type: YTN; PAM sequence: TTT
  source 1..20: mol_type = other DNA
gagatggagtcttgctctgt

SEQ ID NO: 33974 - DNA, 20 bp, synthetic construct
  misc_feature 1..20: note = Description of Artificial Sequence: Synthetic oligonucleotide
  misc_feature 1..20: note = Target: FXN; (+) strand; PAM type: YTN; PAM sequence: TTG
  source 1..20: mol_type = other DNA
agatggagtcttgctctgtt

SEQ ID NO: 33975 - DNA, 20 bp, synthetic construct
  misc_feature 1..20: note = Description of Artificial Sequence: Synthetic oligonucleotide
  misc_feature 1..20: note = Target: FXN; (+) strand; PAM type: YTN; PAM sequence: CTT
  source 1..20: mol_type = other DNA
gctctgttgcccaggctgga

SEQ ID NO: 33976 - DNA, 20 bp, synthetic construct
  misc_feature 1..20: note = Description of Artificial Sequence: Synthetic oligonucleotide
  misc_feature 1..20: note = Target: FXN; (+) strand; PAM type: YTN; PAM sequence: TTG
  source 1..20: mol_type = other DNA
ctctgttgcccaggctggag

SEQ ID NO: 33977 - DNA, 20 bp, synthetic construct
  misc_feature 1..20: note = Description of Artificial Sequence: Synthetic oligonucleotide
  misc_feature 1..20: note = Target: FXN; (+) strand; PAM type: YTN; PAM sequence: CTC
  source 1..20: mol_type = other DNA
tgttgcccaggctggagtgt

SEQ ID NO: 33978 - DNA, 20 bp, synthetic construct
  misc_feature 1..20: note = Description of Artificial Sequence: Synthetic oligonucleotide
  misc_feature 1..20: note = Target: FXN; (+) strand; PAM type: YTN; PAM sequence: CTG
  source 1..20: mol_type = other DNA
ttgcccaggctggagtgtag

SEQ ID NO: 33979 - DNA, 20 bp, synthetic construct
  misc_feature 1..20: note = Description of Artificial Sequence: Synthetic oligonucleotide
  misc_feature 1..20: note = Target: FXN; (+) strand; PAM type: YTN; PAM sequence: TTG
  source 1..20: mol_type = other DNA
cccaggctggagtgtagtgg

SEQ ID NO: 33980 - DNA, 20 bp, synthetic construct
  misc_feature 1..20: note = Description of Artificial Sequence: Synthetic oligonucleotide
  misc_feature 1..20: note = Target: FXN; (+) strand; PAM type: YTN; PAM sequence: CTG
  source 1..20: mol_type = other DNA
gagtgtagtggtgtgatctc

SEQ ID NO: 33981 - DNA, 20 bp, synthetic construct
  misc_feature 1..20: note = Description of Artificial Sequence: Synthetic oligonucleotide
  misc_feature 1..20: note = Target: FXN; (+) strand; PAM type: YTN; PAM sequence: CTC
  source 1..20: mol_type = other DNA
agctcatcgcaacctccacc

SEQ ID NO: 33982 - DNA, 20 bp, synthetic construct
  misc_feature 1..20: note = Description of Artificial Sequence: Synthetic oligonucleotide
  misc_feature 1..20: note = Target: FXN; (+) strand; PAM type: YTN; PAM sequence: CTC
  source 1..20: mol_type = other DNA
atcgcaacctccacctcctg

SEQ ID NO: 33983 - DNA, 20 bp, synthetic construct
  misc_feature 1..20: note = Description of Artificial Sequence: Synthetic oligonucleotide
  misc_feature 1..20: note = Target: FXN; (+) strand; PAM type: YTN; PAM sequence: CTC
  source 1..20: mol_type = other DNA
cacctcctgggttcaagtga

SEQ ID NO: 33984 - DNA, 20 bp, synthetic construct
  misc_feature 1..20: note = Description of Artificial Sequence: Synthetic oligonucleotide
  misc_feature 1..20: note = Target: FXN; (+) strand; PAM type: YTN; PAM sequence: CTC
  source 1..20: mol_type = other DNA
ctgggttcaagtgattctct

SEQ ID NO: 33985 - DNA, 20 bp, synthetic construct
  misc_feature 1..20: note = Description of Artificial Sequence: Synthetic oligonucleotide
  misc_feature 1..20: note = Target: FXN; (+) strand; PAM type: YTN; PAM sequence: CTG
  source 1..20: mol_type = other DNA
ggttcaagtgattctcttgc

SEQ ID NO: 33986 - DNA, 20 bp, synthetic construct
  misc_feature 1..20: note = Description of Artificial Sequence: Synthetic oligonucleotide
  misc_feature 1..20: note = Target: FXN; (+) strand; PAM type: YTN; PAM sequence: TTC
  source 1..20: mol_type = other DNA
aagtgattctcttgcctcag

SEQ ID NO: 33987 - DNA, 20 bp, synthetic construct
  misc_feature 1..20: note = Description of Artificial Sequence: Synthetic oligonucleotide
  misc_feature 1..20: note = Target: FXN; (+) strand; PAM type: YTN; PAM sequence: TTC
  source 1..20: mol_type = other DNA
tcttgcctcagcctcccgag

SEQ ID NO: 33988 - DNA, 20 bp, synthetic construct
  misc_feature 1..20: note = Description of Artificial Sequence: Synthetic oligonucleotide
  misc_feature 1..20: note = Target: FXN; (+) strand; PAM type: YTN; PAM sequence: CTC
  source 1..20: mol_type = other DNA
ttgcctcagcctcccgagta

SEQ ID NO: 33989 - DNA, 20 bp, synthetic construct
  misc_feature 1..20: note = Description of Artificial Sequence: Synthetic oligonucleotide
  misc_feature 1..20: note = Target: FXN; (+) strand; PAM type: YTN; PAM sequence: CTT
  source 1..20: mol_type = other DNA
gcctcagcctcccgagtagc

SEQ ID NO: 33990 - DNA, 20 bp, synthetic construct
  misc_feature 1..20: note = Description of Artificial Sequence: Synthetic oligonucleotide
  misc_feature 1..20: note = Target: FXN; (+) strand; PAM type: YTN; PAM sequence: TTG
  source 1..20: mol_type = other DNA
cctcagcctcccgagtagct

SEQ ID NO: 33991 - DNA, 20 bp, synthetic construct
  misc_feature 1..20: note = Description of Artificial Sequence: Synthetic oligonucleotide
  misc_feature 1..20: note = Target: FXN; (+) strand; PAM type: YTN; PAM sequence: CTC
  source 1..20: mol_type = other DNA
agcctcccgagtagctggga

SEQ ID NO: 33992 - DNA, 20 bp, synthetic construct
  misc_feature 1..20: note = Description of Artificial Sequence: Synthetic oligonucleotide
  misc_feature 1..20: note = Target: FXN; (+) strand; PAM type: YTN; PAM sequence: CTC
  source 1..20: mol_type = other DNA
ccgagtagctgggattacag

SEQ ID NO: 33993 - DNA, 20 bp, synthetic construct
  misc_feature 1..20: note = Description of Artificial Sequence: Synthetic oligonucleotide
  misc_feature 1..20: note = Target: FXN; (+) strand; PAM type: YTN; PAM sequence: CTG
  source 1..20: mol_type = other DNA
ggattacaggcgcctgccac

SEQ ID NO: 33994 - DNA, 20 bp, synthetic construct
  misc_feature 1..20: note = Description of Artificial Sequence: Synthetic oligonucleotide
  misc_feature 1..20: note = Target: FXN; (+) strand; PAM type: YTN; PAM sequence: TTA
  source 1..20: mol_type = other DNA
caggcgcctgccaccacgcc

SEQ ID NO: 33995 - DNA, 20 bp, synthetic construct
  misc_feature 1..20: note = Description of Artificial Sequence: Synthetic oligonucleotide
  misc_feature 1..20: note = Target: FXN; (+) strand; PAM type: YTN; PAM sequence: CTG
  source 1..20: mol_type = other DNA
ccaccacgcctggctaattt

SEQ ID NO: 33996 - DNA, 20 bp, synthetic construct
  misc_feature 1..20: note = Description of Artificial Sequence: Synthetic oligonucleotide
  misc_feature 1..20: note = Target: FXN; (+) strand; PAM type: YTN; PAM sequence: CTG
  source 1..20: mol_type = other DNA
gctaatttttttatattttt

SEQ ID NO: 33997 - DNA, 20 bp, synthetic construct
  misc_feature 1..20: note = Description of Artificial Sequence: Synthetic oligonucleotide
  misc_feature 1..20: note = Target: FXN; (+) strand; PAM type: YTN; PAM sequence: CTA
  source 1..20: mol_type = other DNA
atttttttatatttttagta

SEQ ID NO: 33998 - DNA, 20 bp, synthetic construct
  misc_feature 1..20: note = Description of Artificial Sequence: Synthetic oligonucleotide
  misc_feature 1..20: note = Target: FXN; (+) strand; PAM type: YTN; PAM sequence: TTT
  source 1..20: mol_type = other DNA
ttttatatttttagtagaga

SEQ ID NO: 33999 - DNA, 20 bp, synthetic construct
  misc_feature 1..20: note = Description of Artificial Sequence: Synthetic oligonucleotide
  misc_feature 1..20: note = Target: FXN; (+) strand; PAM type: YTN; PAM sequence: TTT
  source 1..20: mol_type = other DNA
tttatatttttagtagagac

SEQ ID NO: 34000 - DNA, 20 bp, synthetic construct
  misc_feature 1..20: note = Description of Artificial Sequence: Synthetic oligonucleotide
  misc_feature 1..20: note = Target: FXN; (+) strand; PAM type: YTN; PAM sequence: TTT
  source 1..20: mol_type = other DNA
ttatatttttagtagagact

SEQ ID NO: 34001 - DNA, 20 bp, synthetic construct
  misc_feature 1..20: note = Description of Artificial Sequence: Synthetic oligonucleotide
  misc_feature 1..20: note = Target: FXN; (+) strand; PAM type: YTN; PAM sequence: TTT
  source 1..20: mol_type = other DNA
tatatttttagtagagactg

SEQ ID NO: 34002 - DNA, 20 bp, synthetic construct
  misc_feature 1..20: note = Description of Artificial Sequence: Synthetic oligonucleotide
  misc_feature 1..20: note = Target: FXN; (+) strand; PAM type: YTN; PAM sequence: TTT
  source 1..20: mol_type = other DNA
atatttttagtagagactgg

SEQ ID NO: 34003 - DNA, 20 bp, synthetic construct
  misc_feature 1..20: note = Description of Artificial Sequence: Synthetic oligonucleotide
  misc_feature 1..20: note = Target: FXN; (+) strand; PAM type: YTN; PAM sequence: TTA
  source 1..20: mol_type = other DNA
tatttttagtagagactggg

SEQ ID NO: 34004 - DNA, 20 bp, synthetic construct
  misc_feature 1..20: note = Description of Artificial Sequence: Synthetic oligonucleotide
  misc_feature 1..20: note = Target: FXN; (+) strand; PAM type: YTN; PAM sequence: TTT
  source 1..20: mol_type = other DNA
ttagtagagactgggttttg

SEQ ID NO: 34005 - DNA, 20 bp, synthetic construct
  misc_feature 1..20: note = Description of Artificial Sequence: Synthetic oligonucleotide
  misc_feature 1..20: note = Target: FXN; (+) strand; PAM type: YTN; PAM sequence: TTT
  source 1..20: mol_type = other DNA
tagtagagactgggttttgc

SEQ ID NO: 34006 - DNA, 20 bp, synthetic construct
  misc_feature 1..20: note = Description of Artificial Sequence: Synthetic oligonucleotide
  misc_feature 1..20: note = Target: FXN; (+) strand; PAM type: YTN; PAM sequence: TTT
  source 1..20: mol_type = other DNA
agtagagactgggttttgcc

SEQ ID NO: 34007 - DNA, 20 bp, synthetic construct
  misc_feature 1..20: note = Description of Artificial Sequence: Synthetic oligonucleotide
  misc_feature 1..20: note = Target: FXN; (+) strand; PAM type: YTN; PAM sequence: TTA
  source 1..20: mol_type = other DNA
gtagagactgggttttgcca

SEQ ID NO: 34008 - DNA, 20 bp, synthetic construct
  misc_feature 1..20: note = Description of Artificial Sequence: Synthetic oligonucleotide
  misc_feature 1..20: note = Target: FXN; (+) strand; PAM type: YTN; PAM sequence: CTG
  source 1..20: mol_type = other DNA
ggttttgccatgttgtcagg

SEQ ID NO: 34009 - DNA, 20 bp, synthetic construct
  misc_feature 1..20: note = Description of Artificial Sequence: Synthetic oligonucleotide
  misc_feature 1..20: note = Target: FXN; (+) strand; PAM type: YTN; PAM sequence: TTT
  source 1..20: mol_type = other DNA
tgccatgttgtcaggctagt

SEQ ID NO: 34010 - DNA, 20 bp, synthetic construct
  misc_feature 1..20: note = Description of Artificial Sequence: Synthetic oligonucleotide
  misc_feature 1..20: note = Target: FXN; (+) strand; PAM type: YTN; PAM sequence: TTT
  source 1..20: mol_type = other DNA
gccatgttgtcaggctagtc

SEQ ID NO: 34011 - DNA, 20 bp, synthetic construct
  misc_feature 1..20: note = Description of Artificial Sequence: Synthetic oligonucleotide
  misc_feature 1..20: note = Target: FXN; (+) strand; PAM type: YTN; PAM sequence: TTG
  source 1..20: mol_type = other DNA
ccatgttgtcaggctagtct

SEQ ID NO: 34012 - DNA, 20 bp, synthetic construct
  misc_feature 1..20: note = Description of Artificial Sequence: Synthetic oligonucleotide
  misc_feature 1..20: note = Target: FXN; (+) strand; PAM type: YTN; PAM sequence: TTG
  source 1..20: mol_type = other DNA
tcaggctagtcttgaactcc

SEQ ID NO: 34013 - DNA, 20 bp, synthetic construct
  misc_feature 1..20: note = Description of Artificial Sequence: Synthetic oligonucleotide
  misc_feature 1..20: note = Target: FXN; (+) strand; PAM type: YTN; PAM sequence: CTA
  source 1..20: mol_type = other DNA
gtcttgaactcctgacctca

SEQ ID NO: 34014 - DNA, 20 bp, synthetic construct
  misc_feature 1..20: note = Description of Artificial Sequence: Synthetic oligonucleotide
  misc_feature 1..20: note = Target: FXN; (+) strand; PAM type: YTN; PAM sequence: CTT
  source 1..20: mol_type = other DNA
gaactcctgacctcaggtaa

SEQ ID NO: 34015 - DNA, 20 bp, synthetic construct
  misc_feature 1..20: note = Description of Artificial Sequence: Synthetic oligonucleotide
  misc_feature 1..20: note = Target: FXN; (+) strand; PAM type: YTN; PAM sequence: TTG
  source 1..20: mol_type = other DNA
aactcctgacctcaggtaat

SEQ ID NO: 34016 - DNA, 20 bp, synthetic construct
  misc_feature 1..20: note = Description of Artificial Sequence: Synthetic oligonucleotide
  misc_feature 1..20: note = Target: FXN; (+) strand; PAM type: YTN; PAM sequence: CTC
  source 1..20: mol_type = other DNA
ctgacctcaggtaatccaac

SEQ ID NO: 34017 - DNA, 20 bp, synthetic construct
  misc_feature 1..20: note = Description of Artificial Sequence: Synthetic oligonucleotide
  misc_feature 1..20: note = Target: FXN; (+) strand; PAM type: YTN; PAM sequence: CTG
  source 1..20: mol_type = other DNA
acctcaggtaatccaactgc

SEQ ID NO: 34018 - DNA, 20 bp, synthetic construct
  misc_feature 1..20: note = Description of Artificial Sequence: Synthetic oligonucleotide
  misc_feature 1..20: note = Target: FXN; (+) strand; PAM type: YTN; PAM sequence: CTC
  source 1..20: mol_type = other DNA
aggtaatccaactgctttgg

SEQ ID NO: 34019 - DNA, 20 bp, synthetic construct
  misc_feature 1..20: note = Description of Artificial Sequence: Synthetic oligonucleotide
  misc_feature 1..20: note = Target: FXN; (+) strand; PAM type: YTN; PAM sequence: CTG
  source 1..20: mol_type = other DNA
ctttggcctcccaaagtgct

SEQ ID NO: 34020 - DNA, 20 bp, synthetic construct
  misc_feature 1..20: note = Description of Artificial Sequence: Synthetic oligonucleotide
  misc_feature 1..20: note = Target: FXN; (+) strand; PAM type: YTN; PAM sequence: CTT
  source 1..20: mol_type = other DNA
tggcctcccaaagtgctggg

SEQ ID NO: 34021 - DNA, 20 bp, synthetic construct
  misc_feature 1..20: note = Description of Artificial Sequence: Synthetic oligonucleotide
  misc_feature 1..20: note = Target: FXN; (+) strand; PAM type: YTN; PAM sequence: TTT
  source 1..20: mol_type = other DNA
ggcctcccaaagtgctggga

SEQ ID NO: 34022 - DNA, 20 bp, synthetic construct
  misc_feature 1..20: note = Description of Artificial Sequence: Synthetic oligonucleotide
  misc_feature 1..20: note = Target: FXN; (+) strand; PAM type: YTN; PAM sequence: TTG
  source 1..20: mol_type = other DNA
gcctcccaaagtgctgggat

SEQ ID NO: 34023 - DNA, 20 bp, synthetic construct
  misc_feature 1..20: note = Description of Artificial Sequence: Synthetic oligonucleotide
  misc_feature 1..20: note = Target: FXN; (+) strand; PAM type: YTN; PAM sequence: CTC
  source 1..20: mol_type = other DNA
ccaaagtgctgggattacag

SEQ ID NO: 34024 - DNA, 20 bp, synthetic construct
  misc_feature 1..20: note = Description of Artificial Sequence: Synthetic oligonucleotide
  misc_feature 1..20: note = Target: FXN; (+) strand; PAM type: YTN; PAM sequence: CTG
  source 1..20: mol_type = other DNA
ggattacaggcagctccaaa

SEQ ID NO: 34025 - DNA, 20 bp, synthetic construct
  misc_feature 1..20: note = Description of Artificial Sequence: Synthetic oligonucleotide
  misc_feature 1..20: note = Target: FXN; (+) strand; PAM type: YTN; PAM sequence: TTA
  source 1..20: mol_type = other DNA
caggcagctccaaagtgctg

SEQ ID NO: 34026 - DNA, 20 bp, synthetic construct
  misc_feature 1..20: note = Description of Artificial Sequence: Synthetic oligonucleotide
  misc_feature 1..20: note = Target: FXN; (+) strand; PAM type: YTN; PAM sequence: CTC
  source 1..20: mol_type = other DNA
caaagtgctgggattacagg

SEQ ID NO: 34027 - DNA, 20 bp, synthetic construct
  misc_feature 1..20: note = Description of Artificial Sequence: Synthetic oligonucleotide
  misc_feature 1..20: note = Target: FXN; (+) strand; PAM type: YTN; PAM sequence: CTG
  source 1..20: mol_type = other DNA
ggattacaggcatgagccac

SEQ ID NO: 34028 - DNA, 20 bp, synthetic construct
  misc_feature 1..20: note = Description of Artificial Sequence: Synthetic oligonucleotide
  misc_feature 1..20: note = Target: FXN; (+) strand; PAM type: YTN; PAM sequence: TTA
  source 1..20: mol_type = other DNA
caggcatgagccaccatgca

SEQ ID NO: 34029 - DNA, 20 bp, synthetic construct
  misc_feature 1..20: note = Description of Artificial Sequence: Synthetic oligonucleotide
  misc_feature 1..20: note = Target: FXN; (+) strand; PAM type: YTN; PAM sequence: CTG
  source 1..20: mol_type = other DNA
aaataatttttttgaaaggg

SEQ ID NO: 34030 - DNA, 20 bp, synthetic construct
  misc_feature 1..20: note = Description of Artificial Sequence: Synthetic oligonucleotide
  misc_feature 1..20: note = Target: FXN; (+) strand; PAM type: YTN; PAM sequence: TTT
  source 1..20: mol_type = other DNA
ttttgaaagggctagtttct

SEQ ID NO: 34031 - DNA, 20 bp, synthetic construct
  misc_feature 1..20: note = Description of Artificial Sequence: Synthetic oligonucleotide
  misc_feature 1..20: note = Target: FXN; (+) strand; PAM type: YTN; PAM sequence: TTT
  source 1..20: mol_type = other DNA
tttgaaagggctagtttcta

SEQ ID NO: 34032 - DNA, 20 bp, synthetic construct
  misc_feature 1..20: note = Description of Artificial Sequence: Synthetic oligonucleotide
  misc_feature 1..20: note = Target: FXN; (+) strand; PAM type: YTN; PAM sequence: TTT
  source 1..20: mol_type = other DNA
ttgaaagggctagtttctat

SEQ ID NO: 34033 - DNA, 20 bp, synthetic construct
  misc_feature 1..20: note = Description of Artificial Sequence: Synthetic oligonucleotide
  misc_feature 1..20: note = Target: FXN; (+) strand; PAM type: YTN; PAM sequence: TTT
  source 1..20: mol_type = other DNA
tgaaagggctagtttctatt

SEQ ID NO: 34034 - DNA, 20 bp, synthetic construct
  misc_feature 1..20: note = Description of Artificial Sequence: Synthetic oligonucleotide
  misc_feature 1..20: note = Target: FXN; (+) strand; PAM type: YTN; PAM sequence: TTT
  source 1..20: mol_type = other DNA
gaaagggctagtttctattt

SEQ ID NO: 34035 - DNA, 20 bp, synthetic construct
  misc_feature 1..20: note = Description of Artificial Sequence: Synthetic oligonucleotide
  misc_feature 1..20: note = Target: FXN; (+) strand; PAM type: YTN; PAM sequence: TTG
  source 1..20: mol_type = other DNA
aaagggctagtttctattta

SEQ ID NO: 34036 - DNA, 20 bp, synthetic construct
  misc_feature 1..20: note = Description of Artificial Sequence: Synthetic oligonucleotide
  misc_feature 1..20: note = Target: FXN; (+) strand; PAM type: YTN; PAM sequence: CTA
  source 1..20: mol_type = other DNA
gtttctatttagcccttagg

SEQ ID NO: 34037 - DNA, 20 bp, synthetic construct
  misc_feature 1..20: note = Description of Artificial Sequence: Synthetic oligonucleotide
  misc_feature 1..20: note = Target: FXN; (+) strand; PAM type: YTN; PAM sequence: TTT
  source 1..20: mol_type = other DNA
ctatttagcccttaggggaa

SEQ ID NO: 34038 - DNA, 20 bp, synthetic construct
  misc_feature 1..20: note = Description of Artificial Sequence: Synthetic oligonucleotide
  misc_feature 1..20: note = Target: FXN; (+) strand; PAM type: YTN; PAM sequence: TTC
  source 1..20: mol_type = other DNA
tatttagcccttaggggaaa

SEQ ID NO: 34039 - DNA, 20 bp, synthetic construct
  misc_feature 1..20: note = Description of Artificial Sequence: Synthetic oligonucleotide
  misc_feature 1..20: note = Target: FXN; (+) strand; PAM type: YTN; PAM sequence: CTA
  source 1..20: mol_type = other DNA
tttagcccttaggggaaaaa

SEQ ID NO: 34040 - DNA, 20 bp, synthetic construct
  misc_feature 1..20: note = Description of Artificial Sequence: Synthetic oligonucleotide
  misc_feature 1..20: note = Target: FXN; (+) strand; PAM type: YTN; PAM sequence: TTT
  source 1..20: mol_type = other DNA
agcccttaggggaaaaaaaa

SEQ ID NO: 34041 - DNA, 20 bp, synthetic construct
  misc_feature 1..20: note = Description of Artificial Sequence: Synthetic oligonucleotide
  misc_feature 1..20: note = Target: FXN; (+) strand; PAM type: YTN; PAM sequence: TTA
  source 1..20: mol_type = other DNA
gcccttaggggaaaaaaaac

SEQ ID NO: 34042 - DNA, 20 bp, synthetic construct
  misc_feature 1..20: note = Description of Artificial Sequence: Synthetic oligonucleotide
  misc_feature 1..20: note = Target: FXN; (+) strand; PAM type: YTN; PAM sequence: CTT
  source 1..20: mol_type = other DNA
aggggaaaaaaaactaatgg

SEQ ID NO: 34043 - DNA, 20 bp, synthetic construct
  misc_feature 1..20: note = Description of Artificial Sequence: Synthetic oligonucleotide
  misc_feature 1..20: note = Target: FXN; (+) strand; PAM type: YTN; PAM sequence: TTA
  source 1..20: mol_type = other DNA
ggggaaaaaaaactaatggc

SEQ ID NO: 34044 - DNA, 20 bp, synthetic construct
  misc_feature 1..20: note = Description of Artificial Sequence: Synthetic oligonucleotide
  misc_feature 1..20: note = Target: FXN; (+) strand; PAM type: YTN; PAM sequence: CTA
  source 1..20: mol_type = other DNA
atggcagttagggagggaat

SEQ ID NO: 34045 - DNA, 20 bp, synthetic construct
  misc_feature 1..20: note = Description of Artificial Sequence: Synthetic oligonucleotide
  misc_feature 1..20: note = Target: FXN; (+) strand; PAM type: YTN; PAM sequence: TTA
  source 1..20: mol_type = other DNA
gggagggaatagaacgagtc

SEQ ID NO: 34046 - DNA, 20 bp, synthetic construct
  misc_feature 1..20: note = Description of Artificial Sequence: Synthetic oligonucleotide
  misc_feature 1..20: note = Target: FXN; (+) strand; PAM type: YTN; PAM sequence: CTG
  source 1..20: mol_type = other DNA
tttgaactcctttcccatca

SEQ ID NO: 34047 - DNA, 20 bp, synthetic construct
  misc_feature 1..20: note = Description of Artificial Sequence: Synthetic oligonucleotide
  misc_feature 1..20: note = Target: FXN; (+) strand; PAM type: YTN; PAM sequence: TTT
  source 1..20: mol_type = other DNA
gaactcctttcccatcatgg

SEQ ID NO: 34048 - DNA, 20 bp, synthetic construct
  misc_feature 1..20: note = Description of Artificial Sequence: Synthetic oligonucleotide
  misc_feature 1..20: note = Target: FXN; (+) strand; PAM type: YTN; PAM sequence: TTG
  source 1..20: mol_type = other DNA
aactcctttcccatcatggc

SEQ ID NO: 34049 - DNA, 20 bp, synthetic construct
  misc_feature 1..20: note = Description of Artificial Sequence: Synthetic oligonucleotide
  misc_feature 1..20: note = Target: FXN; (+) strand; PAM type: YTN; PAM sequence: CTC
  source 1..20: mol_type = other DNA
ctttcccatcatggccaaaa

SEQ ID NO: 34050 - DNA, 20 bp, synthetic construct
  misc_feature 1..20: note = Description of Artificial Sequence: Synthetic oligonucleotide
  misc_feature 1..20: note = Target: FXN; (+) strand; PAM type: YTN; PAM sequence: CTT
  source 1..20: mol_type = other DNA
tcccatcatggccaaaactt

SEQ ID NO: 34051 - DNA, 20 bp, synthetic construct
  misc_feature 1..20: note = Description of Artificial Sequence: Synthetic oligonucleotide
  misc_feature 1..20: note = Target: FXN; (+) strand; PAM type: YTN; PAM sequence: TTT
  source 1..20: mol_type = other DNA
cccatcatggccaaaactta

SEQ ID NO: 34052 - DNA, 20 bp, synthetic construct
  misc_feature 1..20: note = Description of Artificial Sequence: Synthetic oligonucleotide
  misc_feature 1..20: note = Target: FXN; (+) strand; PAM type: YTN; PAM sequence: TTC
  source 1..20: mol_type = other DNA
ccatcatggccaaaacttaa

SEQ ID NO: 34053 - DNA, 20 bp, synthetic construct
  misc_feature 1..20: note = Description of Artificial Sequence: Synthetic oligonucleotide
  misc_feature 1..20: note = Target: FXN; (+) strand; PAM type: YTN; PAM sequence: CTT
  source 1..20: mol_type = other DNA
aaaattttttttagatatct

SEQ ID NO: 34054 - DNA, 20 bp, synthetic construct
  misc_feature 1..20: note = Description of Artificial Sequence: Synthetic oligonucleotide
  misc_feature 1..20: note = Target: FXN; (+) strand; PAM type: YTN; PAM sequence: TTA
  source 1..20: mol_type = other DNA
aaattttttttagatatctc

SEQ ID NO: 34055 - DNA, 20 bp, synthetic construct
  misc_feature 1..20: note = Description of Artificial Sequence: Synthetic oligonucleotide
  misc_feature 1..20: note = Target: FXN; (+) strand; PAM type: YTN; PAM sequence: TTT
  source 1..20: mol_type = other DNA
tttttagatatctctgggct

SEQ ID NO: 34056 - DNA, 20 bp, synthetic construct
  misc_feature 1..20: note = Description of Artificial Sequence: Synthetic oligonucleotide
  misc_feature 1..20: note = Target: FXN; (+) strand; PAM type: YTN; PAM sequence: TTT
  source 1..20: mol_type = other DNA
ttttagatatctctgggctc

SEQ ID NO: 34057 - DNA, 20 bp, synthetic construct
  misc_feature 1..20: note = Description of Artificial Sequence: Synthetic oligonucleotide
  misc_feature 1..20: note = Target: FXN; (+) strand; PAM type: YTN; PAM sequence: TTT
  source 1..20: mol_type = other DNA
tttagatatctctgggctcc

SEQ ID NO: 34058 - DNA, 20 bp, synthetic construct
  misc_feature 1..20: note = Description of Artificial Sequence: Synthetic oligonucleotide
  misc_feature 1..20: note = Target: FXN; (+) strand; PAM type: YTN; PAM sequence: TTT
  source 1..20: mol_type = other DNA
ttagatatctctgggctccc

SEQ ID NO: 34059 - DNA, 20 bp, synthetic construct
  misc_feature 1..20: note = Description of Artificial Sequence: Synthetic oligonucleotide
  misc_feature 1..20: note = Target: FXN; (+) strand; PAM type: YTN; PAM sequence: TTT
  source 1..20: mol_type = other DNA
tagatatctctgggctcccc

SEQ ID NO: 34060 - DNA, 20 bp, synthetic construct
  misc_feature 1..20: note = Description of Artificial Sequence: Synthetic oligonucleotide
  misc_feature 1..20: note = Target: FXN; (+) strand; PAM type: YTN; PAM sequence: TTT
  source 1..20: mol_type = other DNA
agatatctctgggctcccct

SEQ ID NO: 34061 - DNA, 20 bp, synthetic construct
  misc_feature 1..20: note = Description of Artificial Sequence: Synthetic oligonucleotide
  misc_feature 1..20: note = Target: FXN; (+) strand; PAM type: YTN; PAM sequence: TTA
  source 1..20: mol_type = other DNA
gatatctctgggctcccctt

SEQ ID NO: 34062 - DNA, 20 bp, synthetic construct
  misc_feature 1..20: note = Description of Artificial Sequence: Synthetic oligonucleotide
  misc_feature 1..20: note = Target: FXN; (+) strand; PAM type: YTN; PAM sequence: CTC
  source 1..20: mol_type = other DNA
tgggctccccttggccaaaa

SEQ ID NO: 34063 - DNA, 20 bp, synthetic construct
  misc_feature 1..20: note = Description of Artificial Sequence: Synthetic oligonucleotide
  misc_feature 1..20: note = Target: FXN; (+) strand; PAM type: YTN; PAM sequence: CTG
  source 1..20: mol_type = other DNA
ggctccccttggccaaaaga

SEQ ID NO: 34064 - DNA, 20 bp, synthetic construct
  misc_feature 1..20: note = Description of Artificial Sequence: Synthetic oligonucleotide
  misc_feature 1..20: note = Target: FXN; (+) strand; PAM type: YTN; PAM sequence: CTC
  source 1..20: mol_type = other DNA
cccttggccaaaagatagtt

SEQ ID NO: 34065 - DNA, 20 bp, synthetic construct
  misc_feature 1..20: note = Description of Artificial Sequence: Synthetic oligonucleotide
  misc_feature 1..20: note = Target: FXN; (+) strand; PAM type: YTN; PAM sequence: CTT
  source 1..20: mol_type = other DNA
ggccaaaagatagtttgttg

SEQ ID NO: 34066 - DNA, 20 bp, synthetic construct
  misc_feature 1..20: note = Description of Artificial Sequence: Synthetic oligonucleotide
  misc_feature 1..20: note = Target: FXN; (+) strand; PAM type: YTN; PAM sequence: TTG
  source 1..20: mol_type = other DNA
gccaaaagatagtttgttga

SEQ ID NO: 34067 - DNA, 20 bp, synthetic construct
  misc_feature 1..20: note = Description of Artificial Sequence: Synthetic oligonucleotide
  misc_feature 1..20: note = Target: FXN; (+) strand; PAM type: YTN; PAM sequence: TTT
  source 1..20: mol_type = other DNA
gttgagtcagttgggagctt

SEQ ID NO: 34068 - DNA, 20 bp, synthetic construct
  misc_feature 1..20: note = Description of Artificial Sequence: Synthetic oligonucleotide
  misc_feature 1..20: note = Target: FXN; (+) strand; PAM type: YTN; PAM sequence: TTG
  source 1..20: mol_type = other DNA
ttgagtcagttgggagctta

SEQ ID NO: 34069 - DNA, 20 bp, synthetic construct
  misc_feature 1..20: note = Description of Artificial Sequence: Synthetic oligonucleotide
  misc_feature 1..20: note = Target: FXN; (+) strand; PAM type: YTN; PAM sequence: TTG
  source 1..20: mol_type = other DNA
agtcagttgggagcttagaa

SEQ ID NO: 34070 - DNA, 20 bp, synthetic construct
  misc_feature 1..20: note = Description of Artificial Sequence: Synthetic oligonucleotide
  misc_feature 1..20: note = Target: FXN; (+) strand; PAM type: YTN; PAM sequence: TTG
  source 1..20: mol_type = other DNA
ggagcttagaattttgtttt

SEQ ID NO: 34071 - DNA, 20 bp, synthetic construct
  misc_feature 1..20: note = Description of Artificial Sequence: Synthetic oligonucleotide
  misc_feature 1..20: note = Target: FXN; (+) strand; PAM type: YTN; PAM sequence: CTT
  source 1..20: mol_type = other DNA
agaattttgtttttatttct

SEQ ID NO: 34072 - DNA, 20 bp, synthetic construct
  misc_feature 1..20: note = Description of Artificial Sequence: Synthetic oligonucleotide
  misc_feature 1..20: note = Target: FXN; (+) strand; PAM type: YTN; PAM sequence: TTA
  source 1..20: mol_type = other DNA
gaattttgtttttatttctc

SEQ ID NO: 34073 - DNA, 20 bp, synthetic construct
  misc_feature 1..20: note = Description of Artificial Sequence: Synthetic oligonucleotide
  misc_feature 1..20: note = Target: FXN; (+) strand; PAM type: YTN; PAM sequence: TTT
  source 1..20: mol_type = other DNA
tgtttttatttctcacatca

SEQ ID NO: 34074 - DNA, 20 bp, synthetic construct
  misc_feature 1..20: note = Description of Artificial Sequence: Synthetic oligonucleotide
  misc_feature 1..20: note = Target: FXN; (+) strand; PAM type: YTN; PAM sequence: TTT
  source 1..20: mol_type = other DNA
gtttttatttctcacatcat

SEQ ID NO: 34075 - DNA, 20 bp, synthetic construct
  misc_feature 1..20: note = Description of Artificial Sequence: Synthetic oligonucleotide
  misc_feature 1..20: note = Target: FXN; (+) strand; PAM type: YTN; PAM sequence: TTG
  source 1..20: mol_type = other DNA
tttttatttctcacatcatt

SEQ ID NO: 34076 - DNA, 20 bp, synthetic construct
  misc_feature 1..20: note = Description of Artificial Sequence: Synthetic oligonucleotide
  misc_feature 1..20: note = Target: FXN; (+) strand; PAM type: YTN; PAM sequence: TTT
  source 1..20: mol_type = other DNA
ttatttctcacatcattgaa

SEQ ID NO: 34077 - DNA, 20 bp, synthetic construct
  misc_feature 1..20: note = Description of Artificial Sequence: Synthetic oligonucleotide
  misc_feature 1..20: note = Target: FXN; (+) strand; PAM type: YTN; PAM sequence: TTT
  source 1..20: mol_type = other DNA
tatttctcacatcattgaat

SEQ ID NO: 34078 - DNA, 20 bp, synthetic construct
  misc_feature 1..20: note = Description of Artificial Sequence: Synthetic oligonucleotide
  misc_feature 1..20: note = Target: FXN; (+) strand; PAM type: YTN; PAM sequence: TTT
  source 1..20: mol_type = other DNA
atttctcacatcattgaatc

SEQ ID NO: 34079 - DNA, 20 bp, synthetic construct
  misc_feature 1..20: note = Description of Artificial Sequence: Synthetic oligonucleotide
  misc_feature 1..20: note = Target: FXN; (+) strand; PAM type: YTN; PAM sequence: TTA
  source 1..20: mol_type = other DNA
tttctcacatcattgaatca

SEQ ID NO: 34080 - DNA, 20 bp, synthetic construct
  misc_feature 1..20: note = Description of Artificial Sequence: Synthetic oligonucleotide
  misc_feature 1..20: note = Target: FXN; (+) strand; PAM type: YTN; PAM sequence: TTT
  source 1..20: mol_type = other DNA
ctcacatcattgaatcaatt

SEQ ID NO: 34081 - DNA, 20 bp, synthetic construct
  misc_feature 1..20: note = Description of Artificial Sequence: Synthetic oligonucleotide
  misc_feature 1..20: note = Target: FXN; (+) strand; PAM type: YTN; PAM sequence: TTC
  source 1..20: mol_type = other DNA
tcacatcattgaatcaattt

SEQ ID NO: 34082 - DNA, 20 bp, synthetic construct
  misc_feature 1..20: note = Description of Artificial Sequence: Synthetic oligonucleotide
  misc_feature 1..20: note = Target: FXN; (+) strand; PAM type: YTN; PAM sequence: CTC
  source 1..20: mol_type = other DNA
acatcattgaatcaatttga

SEQ ID NO: 34083 - DNA, 20 bp, synthetic construct
  misc_feature 1..20: note = Description of Artificial Sequence: Synthetic oligonucleotide
  misc_feature 1..20: note = Target: FXN; (+) strand; PAM type: YTN; PAM sequence: TTG
  source 1..20: mol_type = other DNA
aatcaatttgaaccaggcga

SEQ ID NO: 34084 - DNA, 20 bp, synthetic construct
  misc_feature 1..20: note = Description of Artificial Sequence: Synthetic oligonucleotide
  misc_feature 1..20: note = Target: FXN; (+) strand; PAM type: YTN; PAM sequence: TTT
  source 1..20: mol_type = other DNA
gaaccaggcgacaaaacctt

SEQ ID NO: 34085 - DNA, 20 bp, synthetic construct
  misc_feature 1..20: note = Description of Artificial Sequence: Synthetic oligonucleotide
  misc_feature 1..20: note = Target: FXN; (+) strand; PAM type: YTN; PAM sequence: TTG
  source 1..20: mol_type = other DNA
aaccaggcgacaaaaccttc

SEQ ID NO: 34086 - DNA, 20 bp, synthetic construct
  misc_feature 1..20: note = Description of Artificial Sequence: Synthetic oligonucleotide
  misc_feature 1..20: note = Target: FXN; (+) strand; PAM type: YTN; PAM sequence: CTT
  source 1..20: mol_type = other DNA
ctgctcccagtagtgggtca

SEQ ID NO: 34087 - DNA, 20 bp, synthetic construct
  misc_feature 1..20: note = Description of Artificial Sequence: Synthetic oligonucleotide
  misc_feature 1..20: note = Target: FXN; (+) strand; PAM type: YTN; PAM sequence: TTC
  source 1..20: mol_type = other DNA
tgctcccagtagtgggtcag

SEQ ID NO: 34088 - DNA, 20 bp, synthetic construct
  misc_feature 1..20: note = Description of Artificial Sequence: Synthetic oligonucleotide
  misc_feature 1..20: note = Target: FXN; (+) strand; PAM type: YTN; PAM sequence: CTG
  source 1..20: mol_type = other DNA
ctcccagtagtgggtcagag

SEQ ID NO: 34089 - DNA, 20 bp, synthetic construct
  misc_feature 1..20: note = Description of Artificial Sequence: Synthetic oligonucleotide
  misc_feature 1..20: note = Target: FXN; (+) strand; PAM type: YTN; PAM sequence: CTC
  source 1..20: mol_type = other DNA
ccagtagtgggtcagagaac

SEQ ID NO: 34090 - DNA, 20 bp, synthetic construct
  misc_feature 1..20: note = Description of Artificial Sequence: Synthetic oligonucleotide
  misc_feature 1..20: note = Target: FXN; (+) strand; PAM type: YTN; PAM sequence: CTT
  source 1..20: mol_type = other DNA
cctgattcctgccctgagat

SEQ ID NO: 34091 - DNA, 20 bp, synthetic construct
  misc_feature 1..20: note = Description of Artificial Sequence: Synthetic oligonucleotide
  misc_feature 1..20: note = Target: FXN; (+) strand; PAM type: YTN; PAM sequence: TTC
  source 1..20: mol_type = other DNA
ctgattcctgccctgagatt

SEQ ID NO: 34092 - DNA, 20 bp, synthetic construct
  misc_feature 1..20: note = Description of Artificial Sequence: Synthetic oligonucleotide
  misc_feature 1..20: note = Target: FXN; (+) strand; PAM type: YTN; PAM sequence: CTG
  source 1..20: mol_type = other DNA
attcctgccctgagattgtc

SEQ ID NO: 34093 - DNA, 20 bp, synthetic construct
  misc_feature 1..20: note = Description of Artificial Sequence: Synthetic oligonucleotide
  misc_feature 1..20: note = Target: FXN; (+) strand; PAM type: YTN; PAM sequence: TTC
  source 1..20: mol_type = other DNA
ctgccctgagattgtctctc

SEQ ID NO: 34094 - DNA, 20 bp, synthetic construct
  misc_feature 1..20: note = Description of Artificial Sequence: Synthetic oligonucleotide
  misc_feature 1..20: note = Target: FXN; (+) strand; PAM type: YTN; PAM sequence: CTG
  source 1..20: mol_type = other DNA
ccctgagattgtctctctga

SEQ ID NO: 34095 - DNA, 20 bp, synthetic construct
  misc_feature 1..20: note = Description of Artificial Sequence: Synthetic oligonucleotide
  misc_feature 1..20: note = Target: FXN; (+) strand; PAM type: YTN; PAM sequence: CTG
  source 1..20: mol_type = other DNA
agattgtctctctgaagaca

SEQ ID NO: 34096 - DNA, 20 bp, synthetic construct
  misc_feature 1..20: note = Description of Artificial Sequence: Synthetic oligonucleotide
  misc_feature 1..20: note = Target: FXN; (+) strand; PAM type: YTN; PAM sequence: TTG
  source 1..20: mol_type = other DNA
tctctctgaagacaacatta

SEQ ID NO: 34097 - DNA, 20 bp, synthetic construct
  misc_feature 1..20: note = Description of Artificial Sequence: Synthetic oligonucleotide
  misc_feature 1..20: note = Target: FXN; (+) strand; PAM type: YTN; PAM sequence: CTC
  source 1..20: mol_type = other DNA
tctgaagacaacattaggct

SEQ ID NO: 34098 - DNA, 20 bp, synthetic construct
  misc_feature 1..20: note = Description of Artificial Sequence: Synthetic oligonucleotide
  misc_feature 1..20: note = Target: FXN; (+) strand; PAM type: YTN; PAM sequence: CTC
  source 1..20: mol_type = other DNA
tgaagacaacattaggctag

SEQ ID NO: 34099 - DNA, 20 bp, synthetic construct
  misc_feature 1..20: note = Description of Artificial Sequence: Synthetic oligonucleotide
  misc_feature 1..20: note = Target: FXN; (+) strand; PAM type: YTN; PAM sequence: CTG
  source 1..20: mol_type = other DNA
aagacaacattaggctagta

SEQ ID NO: 34100 - DNA, 20 bp, synthetic construct
  misc_feature 1..20: note = Description of Artificial Sequence: Synthetic oligonucleotide
  misc_feature 1..20: note = Target: FXN; (+) strand; PAM type: YTN; PAM sequence: TTA
  source 1..20: mol_type = other DNA
ggctagtaggctttccagat

SEQ ID NO: 34101 - DNA, 20 bp, synthetic construct
  misc_feature 1..20: note = Description of Artificial Sequence: Synthetic oligonucleotide
  misc_feature 1..20: note = Target: FXN; (+) strand; PAM type: YTN; PAM sequence: CTA
  source 1..20: mol_type = other DNA
gtaggctttccagattctgt

SEQ ID NO: 34102 - DNA, 20 bp, synthetic construct
  misc_feature 1..20: note = Description of Artificial Sequence: Synthetic oligonucleotide
  misc_feature 1..20: note = Target: FXN; (+) strand; PAM type: YTN; PAM sequence: CTT
  source 1..20: mol_type = other DNA
tccagattctgtaacccatt

SEQ ID NO: 34103 - DNA, 20 bp, synthetic construct
  misc_feature 1..20: note = Description of Artificial Sequence: Synthetic oligonucleotide
  misc_feature 1..20: note = Target: FXN; (+) strand; PAM type: YTN; PAM sequence: TTT
  source 1..20: mol_type = other DNA
ccagattctgtaacccattc

SEQ ID NO: 34104 - DNA, 20 bp, synthetic construct
  misc_feature 1..20: note = Description of Artificial Sequence: Synthetic oligonucleotide
  misc_feature 1..20: note = Target: FXN; (+) strand; PAM type: YTN; PAM sequence: TTC
  source 1..20: mol_type = other DNA
cagattctgtaacccattct

SEQ ID NO: 34105 - DNA, 20 bp, synthetic construct
  misc_feature 1..20: note = Description of Artificial Sequence: Synthetic oligonucleotide
  misc_feature 1..20: note = Target: FXN; (+) strand; PAM type: YTN; PAM sequence: TTC
  source 1..20: mol_type = other DNA
tgtaacccattctttcaaag

SEQ ID NO: 34106 - DNA, 20 bp, synthetic construct
  misc_feature 1..20: note = Description of Artificial Sequence: Synthetic oligonucleotide
  misc_feature 1..20: note = Target: FXN; (+) strand; PAM type: YTN; PAM sequence: CTG
  source 1..20: mol_type = other DNA
taacccattctttcaaagga

SEQ ID NO: 34107 - DNA, 20 bp, synthetic construct
  misc_feature 1..20: note = Description of Artificial Sequence: Synthetic oligonucleotide
  misc_feature 1..20: note = Target: FXN; (+) strand; PAM type: YTN; PAM sequence: TTC
  source 1..20: mol_type = other DNA
tttcaaaggaagagatgcct

SEQ ID NO: 34108 - DNA, 20 bp, synthetic construct
  misc_feature 1..20: note = Description of Artificial Sequence: Synthetic oligonucleotide
  misc_feature 1..20: note = Target: FXN; (+) strand; PAM type: YTN; PAM sequence: CTT
  source 1..20: mol_type = other DNA
tcaaaggaagagatgcctat

SEQ ID NO: 34109 - DNA, 20 bp, synthetic construct
  misc_feature 1..20: note = Description of Artificial Sequence: Synthetic oligonucleotide
  misc_feature 1..20: note = Target: FXN; (+) strand; PAM type: YTN; PAM sequence: TTT
  source 1..20: mol_type = other DNA
caaaggaagagatgcctata

SEQ ID NO: 34110 - DNA, 20 bp, synthetic construct
  misc_feature 1..20: note = Description of Artificial Sequence: Synthetic oligonucleotide
  misc_feature 1..20: note = Target: FXN; (+) strand; PAM type: YTN; PAM sequence: TTC
  source 1..20: mol_type = other DNA
aaaggaagagatgcctatat

SEQ ID NO: 34111 - DNA, 20 bp, synthetic construct
  misc_feature 1..20: note = Description of Artificial Sequence: Synthetic oligonucleotide
  misc_feature 1..20: note = Target: FXN; (+) strand; PAM type: YTN; PAM sequence: CTA
  source 1..20: mol_type = other DNA
tatttttctagccaattcat

SEQ ID NO: 34112 - DNA, 20 bp, synthetic construct
  misc_feature 1..20: note = Description of Artificial Sequence: Synthetic oligonucleotide
  misc_feature 1..20: note = Target: FXN; (+) strand; PAM type: YTN; PAM sequence: TTT
  source 1..20: mol_type = other DNA
ttctagccaattcatatacc

SEQ ID NO: 34113 - DNA, 20 bp, synthetic construct
  misc_feature 1..20: note = Description of Artificial Sequence: Synthetic oligonucleotide
  misc_feature 1..20: note = Target: FXN; (+) strand; PAM type: YTN; PAM sequence: TTT
  source 1..20: mol_type = other DNA
tctagccaattcatatacct

SEQ ID NO: 34114 - DNA, 20 bp, synthetic construct
  misc_feature 1..20: note = Description of Artificial Sequence: Synthetic oligonucleotide
  misc_feature 1..20: note = Target: FXN; (+) strand; PAM type: YTN; PAM sequence: TTT
  source 1..20: mol_type = other DNA
ctagccaattcatatacctt

SEQ ID NO: 34115 - DNA, 20 bp, synthetic construct
  misc_feature 1..20: note = Description of Artificial Sequence: Synthetic oligonucleotide
  misc_feature 1..20: note = Target: FXN; (+) strand; PAM type: YTN; PAM sequence: TTC
  source 1..20: mol_type = other DNA
tagccaattcatataccttg

SEQ ID NO: 34116 - DNA, 20 bp, synthetic construct
  misc_feature 1..20: note = Description of Artificial Sequence: Synthetic oligonucleotide
  misc_feature 1..20: note = Target: FXN; (+) strand; PAM type: YTN; PAM sequence: CTA
  source 1..20: mol_type = other DNA
gccaattcatataccttgag

SEQ ID NO: 34117 - DNA, 20 bp, synthetic construct
  misc_feature 1..20: note = Description of Artificial Sequence: Synthetic oligonucleotide
  misc_feature 1..20: note = Target: FXN; (+) strand; PAM type: YTN; PAM sequence: TTC
  source 1..20: mol_type = other DNA
atataccttgagtatcactc

SEQ ID NO: 34118 - DNA, 20 bp, synthetic construct
  misc_feature 1..20: note = Description of Artificial Sequence: Synthetic oligonucleotide
  misc_feature 1..20: note = Target: FXN; (+) strand; PAM type: YTN; PAM sequence: CTT
  source 1..20: mol_type = other DNA
gagtatcactcaagggcaaa

SEQ ID NO: 34119 - DNA, 20 bp, synthetic construct
  misc_feature 1..20: note = Description of Artificial Sequence: Synthetic oligonucleotide
  misc_feature 1..20: note = Target: FXN; (+) strand; PAM type: YTN; PAM sequence: TTG
  source 1..20: mol_type = other DNA
agtatcactcaagggcaaaa

SEQ ID NO: 34120 - DNA, 20 bp, synthetic construct
  misc_feature 1..20: note = Description of Artificial Sequence: Synthetic oligonucleotide
  misc_feature 1..20: note = Target: FXN; (+) strand; PAM type: YTN; PAM sequence: CTC
  source 1..20: mol_type = other DNA
aagggcaaaattatttctaa

SEQ ID NO: 34121 - DNA, 20 bp, synthetic construct
  misc_feature 1..20: note = Description of Artificial Sequence: Synthetic oligonucleotide
  misc_feature 1..20: note = Target: FXN; (+) strand; PAM type: YTN; PAM sequence: TTA
  source 1..20: mol_type = other DNA
tttctaacaaatcatttact

SEQ ID NO: 34122 - DNA, 20 bp, synthetic construct
  misc_feature 1..20: note = Description of Artificial Sequence: Synthetic oligonucleotide
  misc_feature 1..20: note = Target: FXN; (+) strand; PAM type: YTN; PAM sequence: TTT
  source 1..20: mol_type = other DNA
ctaacaaatcatttactaat

SEQ ID NO: 34123 - DNA, 20 bp, synthetic construct
  misc_feature 1..20: note = Description of Artificial Sequence: Synthetic oligonucleotide
  misc_feature 1..20: note = Target: FXN; (+) strand; PAM type: YTN; PAM sequence: TTC
  source 1..20: mol_type = other DNA
taacaaatcatttactaatt

SEQ ID NO: 34124 - DNA, 20 bp, synthetic construct
  misc_feature 1..20: note = Description of Artificial Sequence: Synthetic oligonucleotide
  misc_feature 1..20: note = Target: FXN; (+) strand; PAM type: YTN; PAM sequence: CTA
  source 1..20: mol_type = other DNA
acaaatcatttactaattag

SEQ ID NO: 34125 - DNA, 20 bp, synthetic construct
  misc_feature 1..20: note = Description of Artificial Sequence: Synthetic oligonucleotide
  misc_feature 1..20: note = Target: FXN; (+) strand; PAM type: YTN; PAM sequence: TTT
  source 1..20: mol_type = other DNA
actaattagcaaatgcttaa

SEQ ID NO: 34126 - DNA, 20 bp, synthetic construct
  misc_feature 1..20: note = Description of Artificial Sequence: Synthetic oligonucleotide
  misc_feature 1..20: note = Target: FXN; (+) strand; PAM type: YTN; PAM sequence: TTA
  source 1..20: mol_type = other DNA
ctaattagcaaatgcttaag

SEQ ID NO: 34127 - DNA, 20 bp, synthetic construct
  misc_feature 1..20: note = Description of Artificial Sequence: Synthetic oligonucleotide
  misc_feature 1..20: note = Target: FXN; (+) strand; PAM type: YTN; PAM sequence: CTA
  source 1..20: mol_type = other DNA
attagcaaatgcttaagtgt

SEQ ID NO: 34128 - DNA, 20 bp, synthetic construct
  misc_feature 1..20: note = Description of Artificial Sequence: Synthetic oligonucleotide
  misc_feature 1..20: note = Target: FXN; (+) strand; PAM type: YTN; PAM sequence: TTA
  source 1..20: mol_type = other DNA
gcaaatgcttaagtgtagat

SEQ ID NO: 34129 - DNA, 20 bp, synthetic construct
  misc_feature 1..20: note = Description of Artificial Sequence: Synthetic oligonucleotide
  misc_feature 1..20: note = Target: FXN; (+) strand; PAM type: YTN; PAM sequence: CTT
  source 1..20: mol_type = other DNA
aagtgtagatttagaaagct

SEQ ID NO: 34130 - DNA, 20 bp, synthetic construct
  misc_feature 1..20: note = Description of Artificial Sequence: Synthetic oligonucleotide
  misc_feature 1..20: note = Target: FXN; (+) strand; PAM type: YTN; PAM sequence: TTA
  source 1..20: mol_type = other DNA
agtgtagatttagaaagcta

SEQ ID NO: 34131 - DNA, 20 bp, synthetic construct
  misc_feature 1..20: note = Description of Artificial Sequence: Synthetic oligonucleotide
  misc_feature 1..20: note = Target: FXN; (+) strand; PAM type: YTN; PAM sequence: TTT
  source 1..20: mol_type = other DNA
agaaagctaaagctatacag

SEQ ID NO: 34132 - DNA, 20 bp, synthetic construct
  misc_feature 1..20: note = Description of Artificial Sequence: Synthetic oligonucleotide
  misc_feature 1..20: note = Target: FXN; (+) strand; PAM type: YTN; PAM sequence: TTA
  source 1..20: mol_type = other DNA
gaaagctaaagctatacagt

SEQ ID NO: 34133 - DNA, 20 bp, synthetic construct
  misc_feature 1..20: note = Description of Artificial Sequence: Synthetic oligonucleotide
  misc_feature 1..20: note = Target: FXN; (+) strand; PAM type: YTN; PAM sequence: CTA
  source 1..20: mol_type = other DNA
aagctatacagtggctgcca

SEQ ID NO: 34134 - DNA, 20 bp, synthetic construct
  misc_feature 1..20: note = Description of Artificial Sequence: Synthetic oligonucleotide
  misc_feature 1..20: note = Target: FXN; (+) strand; PAM type: YTN; PAM sequence: CTA
  source 1..20: mol_type = other DNA
tacagtggctgccatctata

SEQ ID NO: 34135 - DNA, 20 bp, synthetic construct
  misc_feature 1..20: note = Description of Artificial Sequence: Synthetic oligonucleotide
  misc_feature 1..20: note = Target: FXN; (+) strand; PAM type: YTN; PAM sequence: CTG
  source 1..20: mol_type = other DNA
ccatctatagtttggacttg

SEQ ID NO: 34136 - DNA, 20 bp, synthetic construct
  misc_feature 1..20: note = Description of Artificial Sequence: Synthetic oligonucleotide
  misc_feature 1..20: note = Target: FXN; (+) strand; PAM type: YTN; PAM sequence: CTA
  source 1..20: mol_type = other DNA
tagtttggacttgtgattaa

SEQ ID NO: 34137 - DNA, 20 bp, synthetic construct
  misc_feature 1..20: note = Description of Artificial Sequence: Synthetic oligonucleotide
  misc_feature 1..20: note = Target: FXN; (+) strand; PAM type: YTN; PAM sequence: TTT
  source 1..20: mol_type = other DNA
ggacttgtgattaactacat

SEQ ID NO: 34138 - DNA, 20 bp, synthetic construct
  misc_feature 1..20: note = Description of Artificial Sequence: Synthetic oligonucleotide
  misc_feature 1..20: note = Target: FXN; (+) strand; PAM type: YTN; PAM sequence: TTG
  source 1..20: mol_type = other DNA
gacttgtgattaactacatt

SEQ ID NO: 34139 - DNA, 20 bp, synthetic construct
  misc_feature 1..20: note = Description of Artificial Sequence: Synthetic oligonucleotide
  misc_feature 1..20: note = Target: FXN; (+) strand; PAM type: YTN; PAM sequence: CTT
  source 1..20: mol_type = other DNA
gtgattaactacattgaaat

SEQ ID NO: 34140 - DNA, 20 bp, synthetic construct
  misc_feature 1..20: note = Description of Artificial Sequence: Synthetic oligonucleotide
  misc_feature 1..20: note = Target: FXN; (+) strand; PAM type: YTN; PAM sequence: TTG
  source 1..20: mol_type = other DNA
tgattaactacattgaaatg

SEQ ID NO: 34141 - DNA, 20 bp, synthetic construct
  misc_feature 1..20: note = Description of Artificial Sequence: Synthetic oligonucleotide
  misc_feature 1..20: note = Target: FXN; (+) strand; PAM type: YTN; PAM sequence: TTA
  source 1..20: mol_type = other DNA
actacattgaaatgctaact

SEQ ID NO: 34142 - DNA, 20 bp, synthetic construct
  misc_feature 1..20: note = Description of Artificial Sequence: Synthetic oligonucleotide
  misc_feature 1..20: note = Target: FXN; (+) strand; PAM type: YTN; PAM sequence: CTA
  source 1..20: mol_type = other DNA
cattgaaatgctaactctgt

SEQ ID NO: 34143 - DNA, 20 bp, synthetic construct
  misc_feature 1..20: note = Description of Artificial Sequence: Synthetic oligonucleotide
  misc_feature 1..20: note = Target: FXN; (+) strand; PAM type: YTN; PAM sequence: TTG
  source 1..20: mol_type = other DNA
aaatgctaactctgtaccct

SEQ ID NO: 34144 - DNA, 20 bp, synthetic construct
  misc_feature 1..20: note = Description of Artificial Sequence: Synthetic oligonucleotide
  misc_feature 1..20: note = Target: FXN; (+) strand; PAM type: YTN; PAM sequence: CTA
  source 1..20: mol_type = other DNA
actctgtaccctagagtatg

SEQ ID NO: 34145 - DNA, 20 bp, synthetic construct
  misc_feature 1..20: note = Description of Artificial Sequence: Synthetic oligonucleotide
  misc_feature 1..20: note = Target: FXN; (+) strand; PAM type: YTN; PAM sequence: CTC
  source 1..20: mol_type = other DNA
tgtaccctagagtatgaatt

SEQ ID NO: 34146 - DNA, 20 bp, synthetic construct
  misc_feature 1..20: note = Description of Artificial Sequence: Synthetic oligonucleotide
  misc_feature 1..20: note = Target: FXN; (+) strand; PAM type: YTN; PAM sequence: CTG
  source 1..20: mol_type = other DNA
taccctagagtatgaattcc

SEQ ID NO: 34147 - DNA, 20 bp, synthetic construct
  misc_feature 1..20: note = Description of Artificial Sequence: Synthetic oligonucleotide
  misc_feature 1..20: note = Target: FXN; (+) strand; PAM type: YTN; PAM sequence: CTA
  source 1..20: mol_type = other DNA
gagtatgaattcctgattag

SEQ ID NO: 34148 - DNA, 20 bp, synthetic construct
  misc_feature 1..20: note = Description of Artificial Sequence: Synthetic oligonucleotide
  misc_feature 1..20: note = Target: FXN; (+) strand; PAM type: YTN; PAM sequence: TTC
  source 1..20: mol_type = other DNA
ctgattagagtccttcaggt

SEQ ID NO: 34149 - DNA, 20 bp, synthetic construct
  misc_feature 1..20: note = Description of Artificial Sequence: Synthetic oligonucleotide
  misc_feature 1..20: note = Target: FXN; (+) strand; PAM type: YTN; PAM sequence: CTG
  source 1..20: mol_type = other DNA
attagagtccttcaggtgct

SEQ ID NO: 34150 - DNA, 20 bp, synthetic construct
  misc_feature 1..20: note = Description of Artificial Sequence: Synthetic oligonucleotide
  misc_feature 1..20: note = Target: FXN; (+) strand; PAM type: YTN; PAM sequence: TTA
  source 1..20: mol_type = other DNA
gagtccttcaggtgctaact

SEQ ID NO: 34151 - DNA, 20 bp, synthetic construct
  misc_feature 1..20: note = Description of Artificial Sequence: Synthetic oligonucleotide
  misc_feature 1..20: note = Target: FXN; (+) strand; PAM type: YTN; PAM sequence: CTT
  source 1..20: mol_type = other DNA
caggtgctaactaatttatg

SEQ ID NO: 34152 - DNA, 20 bp, synthetic construct
  misc_feature 1..20: note = Description of Artificial Sequence: Synthetic oligonucleotide
  misc_feature 1..20: note = Target: FXN; (+) strand; PAM type: YTN; PAM sequence: TTC
  source 1..20: mol_type = other DNA
aggtgctaactaatttatgt

SEQ ID NO: 34153 - DNA, 20 bp, synthetic construct
  misc_feature 1..20: note = Description of Artificial Sequence: Synthetic oligonucleotide
  misc_feature 1..20: note = Target: FXN; (+) strand; PAM type: YTN; PAM sequence: CTA
  source 1..20: mol_type = other DNA
actaatttatgtatttcatg

SEQ ID NO: 34154 - DNA, 20 bp, synthetic construct
  misc_feature 1..20: note = Description of Artificial Sequence: Synthetic oligonucleotide
  misc_feature 1..20: note = Target: FXN; (+) strand; PAM type: YTN; PAM sequence: CTA
  source 1..20: mol_type = other DNA
atttatgtatttcatgtttg

SEQ ID NO: 34155 - DNA, 20 bp, synthetic construct
  misc_feature 1..20: note = Description of Artificial Sequence: Synthetic oligonucleotide
  misc_feature 1..20: note = Target: FXN; (+) strand; PAM type: YTN; PAM sequence: TTT
  source 1..20: mol_type = other DNA
atgtatttcatgtttgataa

SEQ ID NO: 34156 - DNA, 20 bp, synthetic construct
  misc_feature 1..20: note = Description of Artificial Sequence: Synthetic oligonucleotide
  misc_feature 1..20: note = Target: FXN; (+) strand; PAM type: YTN; PAM sequence: TTA
  source 1..20: mol_type = other DNA
tgtatttcatgtttgataat

SEQ ID NO: 34157 - DNA, 20 bp, synthetic construct
  misc_feature 1..20: note = Description of Artificial Sequence: Synthetic oligonucleotide
  misc_feature 1..20: note = Target: FXN; (+) strand; PAM type: YTN; PAM sequence: TTT
  source 1..20: mol_type = other DNA
catgtttgataatattatta

SEQ ID NO: 34158 - DNA, 20 bp, synthetic construct
  misc_feature 1..20: note = Description of Artificial Sequence: Synthetic oligonucleotide
  misc_feature 1..20: note = Target: FXN; (+) strand; PAM type: YTN; PAM sequence: TTC
  source 1..20: mol_type = other DNA
atgtttgataatattattac

SEQ ID NO: 34159 - DNA, 20 bp, synthetic construct
  misc_feature 1..20: note = Description of Artificial Sequence: Synthetic oligonucleotide
  misc_feature 1..20: note = Target: FXN; (+) strand; PAM type: YTN; PAM sequence: TTT
  source 1..20: mol_type = other DNA
gataatattattacttgagc

SEQ ID NO: 34160 - DNA, 20 bp, synthetic construct
  misc_feature 1..20: note = Description of Artificial Sequence: Synthetic oligonucleotide
  misc_feature 1..20: note = Target: FXN; (+) strand; PAM type: YTN; PAM sequence: TTG
  source 1..20: mol_type = other DNA
ataatattattacttgagct

SEQ ID NO: 34161 - DNA, 20 bp, synthetic construct
  misc_feature 1..20: note = Description of Artificial Sequence: Synthetic oligonucleotide
  misc_feature 1..20: note = Target: FXN; (+) strand; PAM type: YTN; PAM sequence: TTA
  source 1..20: mol_type = other DNA
ttacttgagctttgtgggag

SEQ ID NO: 34162 - DNA, 20 bp, synthetic construct
  misc_feature 1..20: note = Description of Artificial Sequence: Synthetic oligonucleotide
  misc_feature 1..20: note = Target: FXN; (+) strand; PAM type: YTN; PAM sequence: TTA
  source 1..20: mol_type = other DNA
cttgagctttgtgggagagc

SEQ ID NO: 34163 - DNA, 20 bp, synthetic construct
  misc_feature 1..20: note = Description of Artificial Sequence: Synthetic oligonucleotide
  misc_feature 1..20: note = Target: FXN; (+) strand; PAM type: YTN; PAM sequence: CTT
  source 1..20: mol_type = other DNA
gagctttgtgggagagcagt

SEQ ID NO: 34164 - DNA, 20 bp, synthetic construct
  misc_feature 1..20: note = Description of Artificial Sequence: Synthetic oligonucleotide
  misc_feature 1..20: note = Target: FXN; (+) strand; PAM type: YTN; PAM sequence: TTG
  source 1..20: mol_type = other DNA
agctttgtgggagagcagtc

SEQ ID NO: 34165 - DNA, 20 bp, synthetic construct
  misc_feature 1..20: note = Description of Artificial Sequence: Synthetic oligonucleotide
  misc_feature 1..20: note = Target: FXN; (+) strand; PAM type: YTN; PAM sequence: CTT
  source 1..20: mol_type = other DNA
tgtgggagagcagtcttttc

SEQ ID NO: 34166 - DNA, 20 bp, synthetic construct
  misc_feature 1..20: note = Description of Artificial Sequence: Synthetic oligonucleotide
  misc_feature 1..20: note = Target: FXN; (+) strand; PAM type: YTN; PAM sequence: TTT
  source 1..20: mol_type = other DNA
gtgggagagcagtcttttcc

SEQ ID NO: 34167 - DNA, 20 bp, synthetic construct
  misc_feature 1..20: note = Description of Artificial Sequence: Synthetic oligonucleotide
  misc_feature 1..20: note = Target: FXN; (+) strand; PAM type: YTN; PAM sequence: TTG
  source 1..20: mol_type = other DNA
tgggagagcagtcttttcct

SEQ ID NO: 34168 - DNA, 20 bp, synthetic construct
  misc_feature 1..20: note = Description of Artificial Sequence: Synthetic oligonucleotide
  misc_feature 1..20: note = Target: FXN; (+) strand; PAM type: YTN; PAM sequence: CTT
  source 1..20: mol_type = other DNA
ttcctcccctgagatatagc

SEQ ID NO: 34169 - DNA, 20 bp, synthetic construct
  misc_feature 1..20: note = Description of Artificial Sequence: Synthetic oligonucleotide
  misc_feature 1..20: note = Target: FXN; (+) strand; PAM type: YTN; PAM sequence: TTT
  source 1..20: mol_type = other DNA
tcctcccctgagatatagct

SEQ ID NO: 34170 - DNA, 20 bp, synthetic construct
  misc_feature 1..20: note = Description of Artificial Sequence: Synthetic oligonucleotide
  misc_feature 1..20: note = Target: FXN; (+) strand; PAM type: YTN; PAM sequence: TTT
  source 1..20: mol_type = other DNA
cctcccctgagatatagcta

SEQ ID NO: 34171 - DNA, 20 bp, synthetic construct
  misc_feature 1..20: note = Description of Artificial Sequence: Synthetic oligonucleotide
  misc_feature 1..20: note = Target: FXN; (+) strand; PAM type: YTN; PAM sequence: TTC
  source 1..20: mol_type = other DNA
ctcccctgagatatagctag

SEQ ID NO: 34172 - DNA, 20 bp, synthetic construct
  misc_feature 1..20: note = Description of Artificial Sequence: Synthetic oligonucleotide
  misc_feature 1..20: note = Target: FXN; (+) strand; PAM type: YTN; PAM sequence: CTC
  source 1..20: mol_type = other DNA
ccctgagatatagctagaag

SEQ ID NO: 34173 - DNA, 20 bp, synthetic construct
  misc_feature 1..20: note = Description of Artificial Sequence: Synthetic oligonucleotide
  misc_feature 1..20: note = Target: FXN; (+) strand; PAM type: YTN; PAM sequence: CTG
  source 1..20: mol_type = other DNA
agatatagctagaagttacc

SEQ ID NO: 34174 - DNA, 20 bp, synthetic construct
  misc_feature 1..20: note = Description of Artificial Sequence: Synthetic oligonucleotide
  misc_feature 1..20: note = Target: FXN; (+) strand; PAM type: YTN; PAM sequence: CTA
  source 1..20: mol_type = other DNA
gaagttacctcctttgtgaa

SEQ ID NO: 34175 - DNA, 20 bp, synthetic construct
  misc_feature 1..20: note = Description of Artificial Sequence: Synthetic oligonucleotide
  misc_feature 1..20: note = Target: FXN; (+) strand; PAM type: YTN; PAM sequence: TTA
  source 1..20: mol_type = other DNA
cctcctttgtgaagccttcc

SEQ ID NO: 34176 - DNA, 20 bp, synthetic construct
  misc_feature 1..20: note = Description of Artificial Sequence: Synthetic oligonucleotide
  misc_feature 1..20: note = Target: FXN; (+) strand; PAM type: YTN; PAM sequence: CTC
  source 1..20: mol_type = other DNA
ctttgtgaagccttcctaga

SEQ ID NO: 34177 - DNA, 20 bp, synthetic construct
  misc_feature 1..20: note = Description of Artificial Sequence: Synthetic oligonucleotide
  misc_feature 1..20: note = Target: FXN; (+) strand; PAM type: YTN; PAM sequence: CTT
  source 1..20: mol_type = other DNA
tgtgaagccttcctagatac

SEQ ID NO: 34178 - DNA, 20 bp, synthetic construct
  misc_feature 1..20: note = Description of Artificial Sequence: Synthetic oligonucleotide
  misc_feature 1..20: note = Target: FXN; (+) strand; PAM type: YTN; PAM sequence: TTT
  source 1..20: mol_type = other DNA
gtgaagccttcctagatact

SEQ ID NO: 34179 - DNA, 20 bp, synthetic construct
  misc_feature 1..20: note = Description of Artificial Sequence: Synthetic oligonucleotide
  misc_feature 1..20: note = Target: FXN; (+) strand; PAM type: YTN; PAM sequence: TTG
  source 1..20: mol_type = other DNA
tgaagccttcctagatactc

SEQ ID NO: 34180 - DNA, 20 bp, synthetic construct
  misc_feature 1..20: note = Description of Artificial Sequence: Synthetic oligonucleotide
  misc_feature 1..20: note = Target: FXN; (+) strand; PAM type: YTN; PAM sequence: CTT
  source 1..20: mol_type = other DNA
cctagatactccaagcagac

SEQ ID NO: 34181 - DNA, 20 bp, synthetic construct
  misc_feature 1..20: note = Description of Artificial Sequence: Synthetic oligonucleotide
  misc_feature 1..20: note = Target: FXN; (+) strand; PAM type: YTN; PAM sequence: TTC
  source 1..20: mol_type = other DNA
ctagatactccaagcagaca

SEQ ID NO: 34182 - DNA, 20 bp, synthetic construct
  misc_feature 1..20: note = Description of Artificial Sequence: Synthetic oligonucleotide
  misc_feature 1..20: note = Target: FXN; (+) strand; PAM type: YTN; PAM sequence: CTA
  source 1..20: mol_type = other DNA
gatactccaagcagacacgg

SEQ ID NO: 34183 - DNA, 20 bp, synthetic construct
  misc_feature 1..20: note = Description of Artificial Sequence: Synthetic oligonucleotide
  misc_feature 1..20: note = Target: FXN; (+) strand; PAM type: YTN; PAM sequence: CTC
  source 1..20: mol_type = other DNA
caagcagacacggtccttcc

SEQ ID NO: 34184 - DNA, 20 bp, synthetic construct
  misc_feature 1..20: note = Description of Artificial Sequence: Synthetic oligonucleotide
  misc_feature 1..20: note = Target: FXN; (+) strand; PAM type: YTN; PAM sequence: CTT
  source 1..20: mol_type = other DNA
cctttctcccttgcccagca

SEQ ID NO: 34185 - DNA, 20 bp, synthetic construct
  misc_feature 1..20: note = Description of Artificial Sequence: Synthetic oligonucleotide
  misc_feature 1..20: note = Target: FXN; (+) strand; PAM type: YTN; PAM sequence: TTC
  source 1..20: mol_type = other DNA
ctttctcccttgcccagcac

SEQ ID NO: 34186 - DNA, 20 bp, synthetic construct
  misc_feature 1..20: note = Description of Artificial Sequence: Synthetic oligonucleotide
  misc_feature 1..20: note = Target: FXN; (+) strand; PAM type: YTN; PAM sequence: CTT
  source 1..20: mol_type = other DNA
tctcccttgcccagcactct

SEQ ID NO: 34187 - DNA, 20 bp, synthetic construct
  misc_feature 1..20: note = Description of Artificial Sequence: Synthetic oligonucleotide
  misc_feature 1..20: note = Target: FXN; (+) strand; PAM type: YTN; PAM sequence: TTT
  source 1..20: mol_type = other DNA
ctcccttgcccagcactctg

SEQ ID NO: 34188 - DNA, 20 bp, synthetic construct
  misc_feature 1..20: note = Description of Artificial Sequence: Synthetic oligonucleotide
  misc_feature 1..20: note = Target: FXN; (+) strand; PAM type: YTN; PAM sequence: TTC
  source 1..20: mol_type = other DNA
tcccttgcccagcactctga

SEQ ID NO: 34189 - DNA, 20 bp, synthetic construct
  misc_feature 1..20: note = Description of Artificial Sequence: Synthetic oligonucleotide
  misc_feature 1..20: note = Target: FXN; (+) strand; PAM type: YTN; PAM sequence: CTC
  source 1..20: mol_type = other DNA
ccttgcccagcactctgagg

SEQ ID NO: 34190 - DNA, 20 bp, synthetic construct
  misc_feature 1..20: note = Description of Artificial Sequence: Synthetic oligonucleotide
  misc_feature 1..20: note = Target: FXN; (+) strand; PAM type: YTN; PAM sequence: CTT
  source 1..20: mol_type = other DNA
gcccagcactctgaggttga

SEQ ID NO: 34191 - DNA, 20 bp, synthetic construct
  misc_feature 1..20: note = Description of Artificial Sequence: Synthetic oligonucleotide
  misc_feature 1..20: note = Target: FXN; (+) strand; PAM type: YTN; PAM sequence: TTG
  source 1..20: mol_type = other DNA
cccagcactctgaggttgac

SEQ ID NO: 34192 - DNA, 20 bp, synthetic construct
  misc_feature 1..20: note = Description of Artificial Sequence: Synthetic oligonucleotide
  misc_feature 1..20: note = Target: FXN; (+) strand; PAM type: YTN; PAM sequence: CTC
  source 1..20: mol_type = other DNA
tgaggttgactctgtggagc

SEQ ID NO: 34193 - DNA, 20 bp, synthetic construct
  misc_feature 1..20: note = Description of Artificial Sequence: Synthetic oligonucleotide
  misc_feature 1..20: note = Target: FXN; (+) strand; PAM type: YTN; PAM sequence: CTG
  source 1..20: mol_type = other DNA
aggttgactctgtggagcac

SEQ ID NO: 34194 - DNA, 20 bp, synthetic construct
  misc_feature 1..20: note = Description of Artificial Sequence: Synthetic oligonucleotide
  misc_feature 1..20: note = Target: FXN; (+) strand; PAM type: YTN; PAM sequence: TTG
  source 1..20: mol_type = other DNA
actctgtggagcactgatcc

SEQ ID NO: 34195 - DNA, 20 bp, synthetic construct
  misc_feature 1..20: note = Description of Artificial Sequence: Synthetic oligonucleotide
  misc_feature 1..20: note = Target: FXN; (+) strand; PAM type: YTN; PAM sequence: CTC
  source 1..20: mol_type = other DNA
tgtggagcactgatccctct

SEQ ID NO: 34196 - DNA, 20 bp, synthetic construct
  misc_feature 1..20: note = Description of Artificial Sequence: Synthetic oligonucleotide
  misc_feature 1..20: note = Target: FXN; (+) strand; PAM type: YTN; PAM sequence: CTG
  source 1..20: mol_type = other DNA
tggagcactgatccctctgt

SEQ ID NO: 34197 - DNA, 20 bp, synthetic construct
  misc_feature 1..20: note = Description of Artificial Sequence: Synthetic oligonucleotide
  misc_feature 1..20: note = Target: FXN; (+) strand; PAM type: YTN; PAM sequence: CTG
  source 1..20: mol_type = other DNA
atccctctgtgttataattg

SEQ ID NO: 34198 - DNA, 20 bp, synthetic construct
  misc_feature 1..20: note = Description of Artificial Sequence: Synthetic oligonucleotide
  misc_feature 1..20: note = Target: FXN; (+) strand; PAM type: YTN; PAM sequence: CTC
  source 1..20: mol_type = other DNA
tgtgttataattgtctattt

SEQ ID NO: 34199 - DNA, 20 bp, synthetic construct
  misc_feature 1..20: note = Description of Artificial Sequence: Synthetic oligonucleotide
  misc_feature 1..20: note = Target: FXN; (+) strand; PAM type: YTN; PAM sequence: CTG
  source 1..20: mol_type = other DNA
tgttataattgtctatttac

SEQ ID NO: 34200 - DNA, 20 bp, synthetic construct
  misc_feature 1..20: note = Description of Artificial Sequence: Synthetic oligonucleotide
  misc_feature 1..20: note = Target: FXN; (+) strand; PAM type: YTN; PAM sequence: TTA
  source 1..20: mol_type = other DNA
taattgtctatttacacgtc

SEQ ID NO: 34201 - DNA, 20 bp, synthetic construct
  misc_feature 1..20: note = Description of Artificial Sequence: Synthetic oligonucleotide
  misc_feature 1..20: note = Target: FXN; (+) strand; PAM type: YTN; PAM sequence: TTG
  source 1..20: mol_type = other DNA
tctatttacacgtcagctac

SEQ ID NO: 34202 - DNA, 20 bp, synthetic construct
  misc_feature 1..20: note = Description of Artificial Sequence: Synthetic oligonucleotide
  misc_feature 1..20: note = Target: FXN; (+) strand; PAM type: YTN; PAM sequence: CTA
  source 1..20: mol_type = other DNA
tttacacgtcagctaccacc

SEQ ID NO: 34203 - DNA, 20 bp, synthetic construct
  misc_feature 1..20: note = Description of Artificial Sequence: Synthetic oligonucleotide
  misc_feature 1..20: note = Target: FXN; (+) strand; PAM type: YTN; PAM sequence: TTT
  source 1..20: mol_type = other DNA
acacgtcagctaccacctat

SEQ ID NO: 34204 - DNA, 20 bp, synthetic construct
  misc_feature 1..20: note = Description of Artificial Sequence: Synthetic oligonucleotide
  misc_feature 1..20: note = Target: FXN; (+) strand; PAM type: YTN; PAM sequence: TTA
  source 1..20: mol_type = other DNA
cacgtcagctaccacctata

SEQ ID NO: 34205 - DNA, 20 bp, synthetic construct
  misc_feature 1..20: note = Description of Artificial Sequence: Synthetic oligonucleotide
  misc_feature 1..20: note = Target: FXN; (+) strand; PAM type: YTN; PAM sequence: CTA
  source 1..20: mol_type = other DNA
ccacctataacacactgagt

SEQ ID NO: 34206 - DNA, 20 bp, synthetic construct
  misc_feature 1..20: note = Description of Artificial Sequence: Synthetic oligonucleotide
  misc_feature 1..20: note = Target: FXN; (+) strand; PAM type: YTN; PAM sequence: CTA
  source 1..20: mol_type = other DNA
taacacactgagttcctcaa

SEQ ID NO: 34207 - DNA, 20 bp, synthetic construct
  misc_feature 1..20: note = Description of Artificial Sequence: Synthetic oligonucleotide
  misc_feature 1..20: note = Target: FXN; (+) strand; PAM type: YTN; PAM sequence: CTG
  source 1..20: mol_type = other DNA
agttcctcaacagcagggac

SEQ ID NO: 34208 - DNA, 20 bp, synthetic construct
  misc_feature 1..20: note = Description of Artificial Sequence: Synthetic oligonucleotide
  misc_feature 1..20: note = Target: FXN; (+) strand; PAM type: YTN; PAM sequence: TTC
  source 1..20: mol_type = other DNA
ctcaacagcagggacactgt

SEQ ID NO: 34209 - DNA, 20 bp, synthetic construct
  misc_feature 1..20: note = Description of Artificial Sequence: Synthetic oligonucleotide
  misc_feature 1..20: note = Target: FXN; (+) strand; PAM type: YTN; PAM sequence: CTC
  source 1..20: mol_type = other DNA
aacagcagggacactgtcca

SEQ ID NO: 34210 - DNA, 20 bp, synthetic construct
  misc_feature 1..20: note = Description of Artificial Sequence: Synthetic oligonucleotide
  misc_feature 1..20: note = Target: FXN; (+) strand; PAM type: YTN; PAM sequence: CTG
  source 1..20: mol_type = other DNA
tccattctttgatcccagtg

SEQ ID NO: 34211 - DNA, 20 bp, synthetic construct
  misc_feature 1..20: note = Description of Artificial Sequence: Synthetic oligonucleotide
  misc_feature 1..20: note = Target: FXN; (+) strand; PAM type: YTN; PAM sequence: TTC
  source 1..20: mol_type = other DNA
tttgatcccagtgtctggaa

SEQ ID NO: 34212 - DNA, 20 bp, synthetic construct
  misc_feature 1..20: note = Description of Artificial Sequence: Synthetic oligonucleotide
  misc_feature 1..20: note = Target: FXN; (+) strand; PAM type: YTN; PAM sequence: CTT
  source 1..20: mol_type = other DNA
tgatcccagtgtctggaaca

SEQ ID NO: 34213 - DNA, 20 bp, synthetic construct
  misc_feature 1..20: note = Description of Artificial Sequence: Synthetic oligonucleotide
  misc_feature 1..20: note = Target: FXN; (+) strand; PAM type: YTN; PAM sequence: TTT
  source 1..20: mol_type = other DNA
gatcccagtgtctggaacag

SEQ ID NO: 34214 - DNA, 20 bp, synthetic construct
  misc_feature 1..20: note = Description of Artificial Sequence: Synthetic oligonucleotide
  misc_feature 1..20: note = Target: FXN; (+) strand; PAM type: YTN; PAM sequence: TTG
  source 1..20: mol_type = other DNA
atcccagtgtctggaacagt

SEQ ID NO: 34215 - DNA, 20 bp, synthetic construct
  misc_feature 1..20: note = Description of Artificial Sequence: Synthetic oligonucleotide
  misc_feature 1..20: note = Target: FXN; (+) strand; PAM type: YTN; PAM sequence: CTG
  source 1..20: mol_type = other DNA
gaacagtgccaagtacatag

SEQ ID NO: 34216 - DNA, 20 bp, synthetic construct
  misc_feature 1..20: note = Description of Artificial Sequence: Synthetic oligonucleotide
  misc_feature 1..20: note = Target: FXN; (+) strand; PAM type: YTN; PAM sequence: CTT
  source 1..20: mol_type = other DNA
aataaatattgattcatatg

SEQ ID NO: 34217 - DNA, 20 bp, synthetic construct
  misc_feature 1..20: note = Description of Artificial Sequence: Synthetic oligonucleotide
  misc_feature 1..20: note = Target: FXN; (+) strand; PAM type: YTN; PAM sequence: TTA
  source 1..20: mol_type = other DNA
ataaatattgattcatatgt

SEQ ID NO: 34218 - DNA, 20 bp, synthetic construct
  misc_feature 1..20: note = Description of Artificial Sequence: Synthetic oligonucleotide
  misc_feature 1..20: note = Target: FXN; (+) strand; PAM type: YTN; PAM sequence: TTG
  source 1..20: mol_type = other DNA
attcatatgtaaatgagact

SEQ ID NO: 34219 - DNA, 20 bp, synthetic construct
  misc_feature 1..20: note = Description of Artificial Sequence: Synthetic oligonucleotide
  misc_feature 1..20: note = Target: FXN; (+) strand; PAM type: YTN; PAM sequence: TTC
  source 1..20: mol_type = other DNA
atatgtaaatgagacttttc

SEQ ID NO: 34220 - DNA, 20 bp, synthetic construct
  misc_feature 1..20: note = Description of Artificial Sequence: Synthetic oligonucleotide
  misc_feature 1..20: note = Target: FXN; (+) strand; PAM type: YTN; PAM sequence: CTT
  source 1..20: mol_type = other DNA
ttccaaaacatgctttcgtt

SEQ ID NO: 34221 - DNA, 20 bp, synthetic construct
  misc_feature 1..20: note = Description of Artificial Sequence: Synthetic oligonucleotide
  misc_feature 1..20: note = Target: FXN; (+) strand; PAM type: YTN; PAM sequence: TTT
  source 1..20: mol_type = other DNA
tccaaaacatgctttcgttg

SEQ ID NO: 34222 - DNA, 20 bp, synthetic construct
  misc_feature 1..20: note = Description of Artificial Sequence: Synthetic oligonucleotide
  misc_feature 1..20: note = Target: FXN; (+) strand; PAM type: YTN; PAM sequence: TTT
  source 1..20: mol_type = other DNA
ccaaaacatgctttcgttga

SEQ ID NO: 34223 - DNA, 20 bp, synthetic construct
  misc_feature 1..20: note = Description of Artificial Sequence: Synthetic oligonucleotide
  misc_feature 1..20: note = Target: FXN; (+) strand; PAM type: YTN; PAM sequence: TTC
  source 1..20: mol_type = other DNA
caaaacatgctttcgttgat

SEQ ID NO: 34224 - DNA, 20 bp, synthetic construct
  misc_feature 1..20: note = Description of Artificial Sequence: Synthetic oligonucleotide
  misc_feature 1..20: note = Target: FXN; (+) strand; PAM type: YTN; PAM sequence: CTT
  source 1..20: mol_type = other DNA
tcgttgatgcctctcagcat

SEQ ID NO: 34225 - DNA, 20 bp, synthetic construct
  misc_feature 1..20: note = Description of Artificial Sequence: Synthetic oligonucleotide
  misc_feature 1..20: note = Target: FXN; (+) strand; PAM type: YTN; PAM sequence: TTT
  source 1..20: mol_type = other DNA
cgttgatgcctctcagcatt

SEQ ID NO: 34226 - DNA, 20 bp, synthetic construct
  misc_feature 1..20: note = Description of Artificial Sequence: Synthetic oligonucleotide
  misc_feature 1..20: note = Target: FXN; (+) strand; PAM type: YTN; PAM sequence: TTC
  source 1..20: mol_type = other DNA
gttgatgcctctcagcattt

SEQ ID NO: 34227 - DNA, 20 bp, synthetic construct
  misc_feature 1..20: note = Description of Artificial Sequence: Synthetic oligonucleotide
  misc_feature 1..20: note = Target: FXN; (+) strand; PAM type: YTN; PAM sequence: TTG
  source 1..20: mol_type = other DNA
atgcctctcagcatttatac

SEQ ID NO: 34228 - DNA, 20 bp, synthetic construct
  misc_feature 1..20: note = Description of Artificial Sequence: Synthetic oligonucleotide
  misc_feature 1..20: note = Target: FXN; (+) strand; PAM type: YTN; PAM sequence: CTC
  source 1..20: mol_type = other DNA
tcagcatttatacacctttt

SEQ ID NO: 34229 - DNA, 20 bp, synthetic construct
  misc_feature 1..20: note = Description of Artificial Sequence: Synthetic oligonucleotide
  misc_feature 1..20: note = Target: FXN; (+) strand; PAM type: YTN; PAM sequence: CTC
  source 1..20: mol_type = other DNA
agcatttatacaccttttac

SEQ ID NO: 34230 - DNA, 20 bp, synthetic construct
  misc_feature 1..20: note = Description of Artificial Sequence: Synthetic oligonucleotide
  misc_feature 1..20: note = Target: FXN; (+) strand; PAM type: YTN; PAM sequence: TTT
  source 1..20: mol_type = other DNA
atacaccttttaccaactcg

SEQ ID NO: 34231 - DNA, 20 bp, synthetic construct
  misc_feature 1..20: note = Description of Artificial Sequence: Synthetic oligonucleotide
  misc_feature 1..20: note = Target: FXN; (+) strand; PAM type: YTN; PAM sequence: TTA
  source 1..20: mol_type = other DNA
tacaccttttaccaactcgc

SEQ ID NO: 34232 - DNA, 20 bp, synthetic construct
  misc_feature 1..20: note = Description of Artificial Sequence: Synthetic oligonucleotide
  misc_feature 1..20: note = Target: FXN; (+) strand; PAM type: YTN; PAM sequence: CTT
  source 1..20: mol_type = other DNA
ttaccaactcgctactggcc

SEQ ID NO: 34233 - DNA, 20 bp, synthetic construct
  misc_feature 1..20: note = Description of Artificial Sequence: Synthetic oligonucleotide
  misc_feature 1..20: note = Target: FXN; (+) strand; PAM type: YTN; PAM sequence: TTT
  source 1..20: mol_type = other DNA
taccaactcgctactggcca

SEQ ID NO: 34234 - DNA, 20 bp, synthetic construct
  misc_feature 1..20: note = Description of Artificial Sequence: Synthetic oligonucleotide
  misc_feature 1..20: note = Target: FXN; (+) strand; PAM type: YTN; PAM sequence: TTT
  source 1..20: mol_type = other DNA
accaactcgctactggccac

SEQ ID NO: 34235 - DNA, 20 bp, synthetic construct
  misc_feature 1..20: note = Description of Artificial Sequence: Synthetic oligonucleotide
  misc_feature 1..20: note = Target: FXN; (+) strand; PAM type: YTN; PAM sequence: TTA
  source 1..20: mol_type = other DNA
ccaactcgctactggccaca

SEQ ID NO: 34236 - DNA, 20 bp, synthetic construct
  misc_feature 1..20: note = Description of Artificial Sequence: Synthetic oligonucleotide
  misc_feature 1..20: note = Target: FXN; (+) strand; PAM type: YTN; PAM sequence: CTC
  source 1..20: mol_type = other DNA
gctactggccacatagacaa

SEQ ID NO: 34237 - DNA, 20 bp, synthetic construct
  misc_feature 1..20: note = Description of Artificial Sequence: Synthetic oligonucleotide
  misc_feature 1..20: note = Target: FXN; (+) strand; PAM type: YTN; PAM sequence: CTA
  source 1..20: mol_type = other DNA
ctggccacatagacaaatga

SEQ ID NO: 34238 - DNA, 20 bp, synthetic construct
  misc_feature 1..20: note = Description of Artificial Sequence: Synthetic oligonucleotide
  misc_feature 1..20: note = Target: FXN; (+) strand; PAM type: YTN; PAM sequence: CTG
  source 1..20: mol_type = other DNA
gccacatagacaaatgaaag

SEQ ID NO: 34239 - DNA, 20 bp, synthetic construct
  misc_feature 1..20: note = Description of Artificial Sequence: Synthetic oligonucleotide
  misc_feature 1..20: note = Target: FXN; (+) strand; PAM type: YTN; PAM sequence: CTG
  source 1..20: mol_type = other DNA
ttcttttttctctctgtgga

SEQ ID NO: 34240 - DNA, 20 bp, synthetic construct
  misc_feature 1..20: note = Description of Artificial Sequence: Synthetic oligonucleotide
  misc_feature 1..20: note = Target: FXN; (+) strand; PAM type: YTN; PAM sequence: TTC
  source 1..20: mol_type = other DNA
ttttttctctctgtggagtg

SEQ ID NO: 34241 - DNA, 20 bp, synthetic construct
  misc_feature 1..20: note = Description of Artificial Sequence: Synthetic oligonucleotide
  misc_feature 1..20: note = Target: FXN; (+) strand; PAM type: YTN; PAM sequence: CTT
  source 1..20: mol_type = other DNA
ttttctctctgtggagtggg

SEQ ID NO: 34242 - DNA, 20 bp, synthetic construct
  misc_feature 1..20: note = Description of Artificial Sequence: Synthetic oligonucleotide
  misc_feature 1..20: note = Target: FXN; (+) strand; PAM type: YTN; PAM sequence: TTT
  source 1..20: mol_type = other DNA
tttctctctgtggagtggga

SEQ ID NO: 34243 - DNA, 20 bp, synthetic construct
  misc_feature 1..20: note = Description of Artificial Sequence: Synthetic oligonucleotide
  misc_feature 1..20: note = Target: FXN; (+) strand; PAM type: YTN; PAM sequence: TTT
  source 1..20: mol_type = other DNA
ttctctctgtggagtgggag

SEQ ID NO: 34244 - DNA, 20 bp, synthetic construct
  misc_feature 1..20: note = Description of Artificial Sequence: Synthetic oligonucleotide
  misc_feature 1..20: note = Target: FXN; (+) strand; PAM type: YTN; PAM sequence: TTT
  source 1..20: mol_type = other DNA
tctctctgtggagtgggaga

SEQ ID NO: 34245 - DNA, 20 bp, synthetic construct
  misc_feature 1..20: note = Description of Artificial Sequence: Synthetic oligonucleotide
  misc_feature 1..20: note = Target: FXN; (+) strand; PAM type: YTN; PAM sequence: TTT
  source 1..20: mol_type = other DNA
ctctctgtggagtgggagac

SEQ ID NO: 34246 - DNA, 20 bp, synthetic construct
  misc_feature 1..20: note = Description of Artificial Sequence: Synthetic oligonucleotide
  misc_feature 1..20: note = Target: FXN; (+) strand; PAM type: YTN; PAM sequence: TTC
  source 1..20: mol_type = other DNA
tctctgtggagtgggagact

SEQ ID NO: 34247 - DNA, 20 bp, synthetic construct
  misc_feature 1..20: note = Description of Artificial Sequence: Synthetic oligonucleotide
  misc_feature 1..20: note = Target: FXN; (+) strand; PAM type: YTN; PAM sequence: CTC
  source 1..20: mol_type = other DNA
tctgtggagtgggagactta

SEQ ID NO: 34248 - DNA, 20 bp, synthetic construct
  misc_feature 1..20: note = Description of Artificial Sequence: Synthetic oligonucleotide
  misc_feature 1..20: note = Target: FXN; (+) strand; PAM type: YTN; PAM sequence: CTC
  source 1..20: mol_type = other DNA
tgtggagtgggagacttaag

SEQ ID NO: 34249 - DNA, 20 bp, synthetic construct
  misc_feature 1..20: note = Description of Artificial Sequence: Synthetic oligonucleotide
  misc_feature 1..20: note = Target: FXN; (+) strand; PAM type: YTN; PAM sequence: CTG
  source 1..20: mol_type = other DNA
tggagtgggagacttaagtg

SEQ ID NO: 34250 - DNA, 20 bp, synthetic construct
  misc_feature 1..20: note = Description of Artificial Sequence: Synthetic oligonucleotide
  misc_feature 1..20: note = Target: FXN; (+) strand; PAM type: YTN; PAM sequence: CTT
  source 1..20: mol_type = other DNA
aagtggcttcttaactggtg

SEQ ID NO: 34251 - DNA, 20 bp, synthetic construct
  misc_feature 1..20: note = Description of Artificial Sequence: Synthetic oligonucleotide
  misc_feature 1..20: note = Target: FXN; (+) strand; PAM type: YTN; PAM sequence: TTA
  source 1..20: mol_type = other DNA
agtggcttcttaactggtgt

SEQ ID NO: 34252 - DNA, 20 bp, synthetic construct
  misc_feature 1..20: note = Description of Artificial Sequence: Synthetic oligonucleotide
  misc_feature 1..20: note = Target: FXN; (+) strand; PAM type: YTN; PAM sequence: CTT
  source 1..20: mol_type = other DNA
cttaactggtgtgtcgtctg

SEQ ID NO: 34253 - DNA, 20 bp, synthetic construct
  misc_feature 1..20: note = Description of Artificial Sequence: Synthetic oligonucleotide
  misc_feature 1..20: note = Target: FXN; (+) strand; PAM type: YTN; PAM sequence: TTC
  source 1..20: mol_type = other DNA
ttaactggtgtgtcgtctga

SEQ ID NO: 34254 - DNA, 20 bp, synthetic construct
  misc_feature 1..20: note = Description of Artificial Sequence: Synthetic oligonucleotide
  misc_feature 1..20: note = Target: FXN; (+) strand; PAM type: YTN; PAM sequence: CTT
  source 1..20: mol_type = other DNA
aactggtgtgtcgtctgatc

SEQ ID NO: 34255 - DNA, 20 bp, synthetic construct
  misc_feature 1..20: note = Description of Artificial Sequence: Synthetic oligonucleotide
  misc_feature 1..20: note = Target: FXN; (+) strand; PAM type: YTN; PAM sequence: TTA
  source 1..20: mol_type = other DNA
actggtgtgtcgtctgatca

SEQ ID NO: 34256 - DNA, 20 bp, synthetic construct
  misc_feature 1..20: note = Description of Artificial Sequence: Synthetic oligonucleotide
  misc_feature 1..20: note = Target: FXN; (+) strand; PAM type: YTN; PAM sequence: CTG
  source 1..20: mol_type = other DNA
gtgtgtcgtctgatcaagtg

SEQ ID NO: 34257 - DNA, 20 bp, synthetic construct
  misc_feature 1..20: note = Description of Artificial Sequence: Synthetic oligonucleotide
  misc_feature 1..20: note = Target: FXN; (+) strand; PAM type: YTN; PAM sequence: CTG
  source 1..20: mol_type = other DNA
atcaagtggtccaggtaaca

SEQ ID NO: 34258 - DNA, 20 bp, synthetic construct
  misc_feature 1..20: note = Description of Artificial Sequence: Synthetic oligonucleotide
  misc_feature 1..20: note = Target: FXN; (+) strand; PAM type: YTN; PAM sequence: CTG
  source 1..20: mol_type = other DNA
gcccaggcatcaccccttac

SEQ ID NO: 34259 - DNA, 20 bp, synthetic construct
  misc_feature 1..20: note = Description of Artificial Sequence: Synthetic oligonucleotide
  misc_feature 1..20: note = Target: FXN; (+) strand; PAM type: YTN; PAM sequence: CTT
  source 1..20: mol_type = other DNA
actggcactggtcattacag

SEQ ID NO: 34260 - DNA, 20 bp, synthetic construct
  misc_feature 1..20: note = Description of Artificial Sequence: Synthetic oligonucleotide
  misc_feature 1..20: note = Target: FXN; (+) strand; PAM type: YTN; PAM sequence: TTA
  source 1..20: mol_type = other DNA
ctggcactggtcattacaga

SEQ ID NO: 34261 - DNA, 20 bp, synthetic construct
  misc_feature 1..20: note = Description of Artificial Sequence: Synthetic oligonucleotide
  misc_feature 1..20: note = Target: FXN; (+) strand; PAM type: YTN; PAM sequence: CTG
  source 1..20: mol_type = other DNA
gcactggtcattacagaaga

SEQ ID NO: 34262 - DNA, 20 bp, synthetic construct
  misc_feature 1..20: note = Description of Artificial Sequence: Synthetic oligonucleotide
  misc_feature 1..20: note = Target: FXN; (+) strand; PAM type: YTN; PAM sequence: CTG
  source 1..20: mol_type = other DNA
gtcattacagaagacactct

SEQ ID NO: 34263 - DNA, 20 bp, synthetic construct
  misc_feature 1..20: note = Description of Artificial Sequence: Synthetic oligonucleotide
  misc_feature 1..20: note = Target: FXN; (+) strand; PAM type: YTN; PAM sequence: TTA
  source 1..20: mol_type = other DNA
cagaagacactctaccagag

SEQ ID NO: 34264 - DNA, 20 bp, synthetic construct
  misc_feature 1..20: note = Description of Artificial Sequence: Synthetic oligonucleotide
  misc_feature 1..20: note = Target: FXN; (+) strand; PAM type: YTN; PAM sequence: CTC
  source 1..20: mol_type = other DNA
taccagagctgaaaggacct

SEQ ID NO: 34265 - DNA, 20 bp, synthetic construct
  misc_feature 1..20: note = Description of Artificial Sequence: Synthetic oligonucleotide
  misc_feature 1..20: note = Target: FXN; (+) strand; PAM type: YTN; PAM sequence: CTA
  source 1..20: mol_type = other DNA
ccagagctgaaaggacctct

SEQ ID NO: 34266 - DNA, 20 bp, synthetic construct
  misc_feature 1..20: note = Description of Artificial Sequence: Synthetic oligonucleotide
  misc_feature 1..20: note = Target: FXN; (+) strand; PAM type: YTN; PAM sequence: CTG
  source 1..20: mol_type = other DNA
aaaggacctcttgtcactag

SEQ ID NO: 34267 - DNA, 20 bp, synthetic construct
  misc_feature 1..20: note = Description of Artificial Sequence: Synthetic oligonucleotide
  misc_feature 1..20: note = Target: FXN; (+) strand; PAM type: YTN; PAM sequence: CTC
  source 1..20: mol_type = other DNA
ttgtcactaggcagctgtgg

SEQ ID NO: 34268 - DNA, 20 bp, synthetic construct
  misc_feature 1..20: note = Description of Artificial Sequence: Synthetic oligonucleotide
  misc_feature 1..20: note = Target: FXN; (+) strand; PAM type: YTN; PAM sequence: CTT
  source 1..20: mol_type = other DNA
gtcactaggcagctgtggag

SEQ ID NO: 34269 - DNA, 20 bp, synthetic construct
  misc_feature 1..20: note = Description of Artificial Sequence: Synthetic oligonucleotide
  misc_feature 1..20: note = Target: FXN; (+) strand; PAM type: YTN; PAM sequence: TTG
  source 1..20: mol_type = other DNA
tcactaggcagctgtggagt

SEQ ID NO: 34270 - DNA, 20 bp, synthetic construct
  misc_feature 1..20: note = Description of Artificial Sequence: Synthetic oligonucleotide
  misc_feature 1..20: note = Target: FXN; (+) strand; PAM type: YTN; PAM sequence: CTA
  source 1..20: mol_type = other DNA
ggcagctgtggagtccgctc

SEQ ID NO: 34271 - DNA, 20 bp, synthetic construct
  misc_feature 1..20: note = Description of Artificial Sequence: Synthetic oligonucleotide
  misc_feature 1..20: note = Target: FXN; (+) strand; PAM type: YTN; PAM sequence: CTG
  source 1..20: mol_type = other DNA
tggagtccgctctacttgac

SEQ ID NO: 34272 - DNA, 20 bp, synthetic construct
  misc_feature 1..20: note = Description of Artificial Sequence: Synthetic oligonucleotide
  misc_feature 1..20: note = Target: FXN; (+) strand; PAM type: YTN; PAM sequence: CTC
  source 1..20: mol_type = other DNA
tacttgacctagtaaaatct

SEQ ID NO: 34273 - DNA, 20 bp, synthetic construct
  misc_feature 1..20: note = Description of Artificial Sequence: Synthetic oligonucleotide
  misc_feature 1..20: note = Target: FXN; (+) strand; PAM type: YTN; PAM sequence: CTA
  source 1..20: mol_type = other DNA
cttgacctagtaaaatctgc

SEQ ID NO: 34274 - DNA, 20 bp, synthetic construct
  misc_feature 1..20: note = Description of Artificial Sequence: Synthetic oligonucleotide
  misc_feature 1..20: note = Target: FXN; (+) strand; PAM type: YTN; PAM sequence: CTT
  source 1..20: mol_type = other DNA
gacctagtaaaatctgcctg

SEQ ID NO: 34275 - DNA, 20 bp, synthetic construct
  misc_feature 1..20: note = Description of Artificial Sequence: Synthetic oligonucleotide
  misc_feature 1..20: note = Target: FXN; (+) strand; PAM type: YTN; PAM sequence: TTG
  source 1..20: mol_type = other DNA
acctagtaaaatctgcctgg

SEQ ID NO: 34276 - DNA, 20 bp, synthetic construct
  misc_feature 1..20: note = Description of Artificial Sequence: Synthetic oligonucleotide
  misc_feature 1..20: note = Target: FXN; (+) strand; PAM type: YTN; PAM sequence: CTA
  source 1..20: mol_type = other DNA
gtaaaatctgcctggagact

SEQ ID NO: 34277 - DNA, 20 bp, synthetic construct
  misc_feature 1..20: note = Description of Artificial Sequence: Synthetic oligonucleotide
  misc_feature 1..20: note = Target: FXN; (+) strand; PAM type: YTN; PAM sequence: CTG
  source 1..20: mol_type = other DNA
cctggagactgttagagtca

SEQ ID NO: 34278 - DNA, 20 bp, synthetic construct
  misc_feature 1..20: note = Description of Artificial Sequence: Synthetic oligonucleotide
  misc_feature 1..20: note = Target: FXN; (+) strand; PAM type: YTN; PAM sequence: CTG
  source 1..20: mol_type = other DNA
gagactgttagagtcacccc

SEQ ID NO: 34279 - DNA, 20 bp, synthetic construct
  misc_feature 1..20: note = Description of Artificial Sequence: Synthetic oligonucleotide
  misc_feature 1..20: note = Target: FXN; (+) strand; PAM type: YTN; PAM sequence: CTG
  source 1..20: mol_type = other DNA
ttagagtcaccccactacct

SEQ ID NO: 34280 - DNA, 20 bp, synthetic construct
  misc_feature 1..20: note = Description of Artificial Sequence: Synthetic oligonucleotide
  misc_feature 1..20: note = Target: FXN; (+) strand; PAM type: YTN; PAM sequence: TTA
  source 1..20: mol_type = other DNA
gagtcaccccactacctgaa

SEQ ID NO: 34281 - DNA, 20 bp, synthetic construct
  misc_feature 1..20: note = Description of Artificial Sequence: Synthetic oligonucleotide
  misc_feature 1..20: note = Target: FXN; (+) strand; PAM type: YTN; PAM sequence: CTA
  source 1..20: mol_type = other DNA
cctgaagttacctccaggct

SEQ ID NO: 34282 - DNA, 20 bp, synthetic construct
  misc_feature 1..20: note = Description of Artificial Sequence: Synthetic oligonucleotide
  misc_feature 1..20: note = Target: FXN; (+) strand; PAM type: YTN; PAM sequence: CTG
  source 1..20: mol_type = other DNA
aagttacctccaggctgacc

SEQ ID NO: 34283 - DNA, 20 bp, synthetic construct
  misc_feature 1..20: note = Description of Artificial Sequence: Synthetic oligonucleotide
  misc_feature 1..20: note = Target: FXN; (+) strand; PAM type: YTN; PAM sequence: TTA
  source 1..20: mol_type = other DNA
cctccaggctgacctctttt

SEQ ID NO: 34284 - DNA, 20 bp, synthetic construct
  misc_feature 1..20: note = Description of Artificial Sequence: Synthetic oligonucleotide
  misc_feature 1..20: note = Target: FXN; (+) strand; PAM type: YTN; PAM sequence: CTC
  source 1..20: mol_type = other DNA
caggctgacctctttttttt

SEQ ID NO: 34285 - DNA, 20 bp, synthetic construct
  misc_feature 1..20: note = Description of Artificial Sequence: Synthetic oligonucleotide
  misc_feature 1..20: note = Target: FXN; (+) strand; PAM type: YTN; PAM sequence: CTG
  source 1..20: mol_type = other DNA
acctcttttttttcccaggt

SEQ ID NO: 34286 - DNA, 20 bp, synthetic construct
  misc_feature 1..20: note = Description of Artificial Sequence: Synthetic oligonucleotide
  misc_feature 1..20: note = Target: FXN; (+) strand; PAM type: YTN; PAM sequence: CTC
  source 1..20: mol_type = other DNA
ttttttttcccaggtggagt

SEQ ID NO: 34287 - DNA, 20 bp, synthetic construct
  misc_feature 1..20: note = Description of Artificial Sequence: Synthetic oligonucleotide
  misc_feature 1..20: note = Target: FXN; (+) strand; PAM type: YTN; PAM sequence: CTT
  source 1..20: mol_type = other DNA
ttttttcccaggtggagtcc

SEQ ID NO: 34288 - DNA, 20 bp, synthetic construct
  misc_feature 1..20: note = Description of Artificial Sequence: Synthetic oligonucleotide
  misc_feature 1..20: note = Target: FXN; (+) strand; PAM type: YTN; PAM sequence: TTT
  source 1..20: mol_type = other DNA
tttttcccaggtggagtcct

SEQ ID NO: 34289 - DNA, 20 bp, synthetic construct
  misc_feature 1..20: note = Description of Artificial Sequence: Synthetic oligonucleotide
  misc_feature 1..20: note = Target: FXN; (+) strand; PAM type: YTN; PAM sequence: TTT
  source 1..20: mol_type = other DNA
ttttcccaggtggagtcctg

SEQ ID NO: 34290 - DNA, 20 bp, synthetic construct
  misc_feature 1..20: note = Description of Artificial Sequence: Synthetic oligonucleotide
  misc_feature 1..20: note = Target: FXN; (+) strand; PAM type: YTN; PAM sequence: TTT
  source 1..20: mol_type = other DNA
tttcccaggtggagtcctgg

SEQ ID NO: 34291 - DNA, 20 bp, synthetic construct
  misc_feature 1..20: note = Description of Artificial Sequence: Synthetic oligonucleotide
  misc_feature 1..20: note = Target: FXN; (+) strand; PAM type: YTN; PAM sequence: TTT
  source 1..20: mol_type = other DNA
ttcccaggtggagtcctggc

SEQ ID NO: 34292 - DNA, 20 bp, synthetic construct
  misc_feature 1..20: note = Description of Artificial Sequence: Synthetic oligonucleotide
  misc_feature 1..20: note = Target: FXN; (+) strand; PAM type: YTN; PAM sequence: TTT
  source 1..20: mol_type = other DNA
tcccaggtggagtcctggca

SEQ ID NO: 34293 - DNA, 20 bp, synthetic construct
  misc_feature 1..20: note = Description of Artificial Sequence: Synthetic oligonucleotide
  misc_feature 1..20: note = Target: FXN; (+) strand; PAM type: YTN; PAM sequence: TTT
  source 1..20: mol_type = other DNA
cccaggtggagtcctggcat

SEQ ID NO: 34294 - DNA, 20 bp, synthetic construct
  misc_feature 1..20: note = Description of Artificial Sequence: Synthetic oligonucleotide
  misc_feature 1..20: note = Target: FXN; (+) strand; PAM type: YTN; PAM sequence: TTC
  source 1..20: mol_type = other DNA
ccaggtggagtcctggcatc

SEQ ID NO: 34295 - DNA, 20 bp, synthetic construct
  misc_feature 1..20: note = Description of Artificial Sequence: Synthetic oligonucleotide
  misc_feature 1..20: note = Target: FXN; (+) strand; PAM type: YTN; PAM sequence: CTG
  source 1..20: mol_type = other DNA
gcatcttagatattttaata

SEQ ID NO: 34296 - DNA, 20 bp, synthetic construct
  misc_feature 1..20: note = Description of Artificial Sequence: Synthetic oligonucleotide
  misc_feature 1..20: note = Target: FXN; (+) strand; PAM type: YTN; PAM sequence: CTT
  source 1..20: mol_type = other DNA
agatattttaataaggattt

SEQ ID NO: 34297 - DNA, 20 bp, synthetic construct
  misc_feature 1..20: note = Description of Artificial Sequence: Synthetic oligonucleotide
  misc_feature 1..20: note = Target: FXN; (+) strand; PAM type: YTN; PAM sequence: TTA
  source 1..20: mol_type = other DNA
gatattttaataaggatttg

SEQ ID NO: 34298 - DNA, 20 bp, synthetic construct
  misc_feature 1..20: note = Description of Artificial Sequence: Synthetic oligonucleotide
  misc_feature 1..20: note = Target: FXN; (+) strand; PAM type: YTN; PAM sequence: TTT
  source 1..20: mol_type = other DNA
taataaggatttgcttgttg

SEQ ID NO: 34299 - DNA, 20 bp, synthetic construct
  misc_feature 1..20: note = Description of Artificial Sequence: Synthetic oligonucleotide
  misc_feature 1..20: note = Target: FXN; (+) strand; PAM type: YTN; PAM sequence: TTT
  source 1..20: mol_type = other DNA
aataaggatttgcttgttga

SEQ ID NO: 34300 - DNA, 20 bp, synthetic construct
  misc_feature 1..20: note = Description of Artificial Sequence: Synthetic oligonucleotide
  misc_feature 1..20: note = Target: FXN; (+) strand; PAM type: YTN; PAM sequence: TTA
  source 1..20: mol_type = other DNA
ataaggatttgcttgttgac

SEQ ID NO: 34301 - DNA, 20 bp, synthetic construct
  misc_feature 1..20: note = Description of Artificial Sequence: Synthetic oligonucleotide
  misc_feature 1..20: note = Target: FXN; (+) strand; PAM type: YTN; PAM sequence: TTT
  source 1..20: mol_type = other DNA
gcttgttgacatgttcttta

SEQ ID NO: 34302 - DNA, 20 bp, synthetic construct
  misc_feature 1..20: note = Description of Artificial Sequence: Synthetic oligonucleotide
  misc_feature 1..20: note = Target: FXN; (+) strand; PAM type: YTN; PAM sequence: TTG
  source 1..20: mol_type = other DNA
cttgttgacatgttctttat

SEQ ID NO: 34303 - DNA, 20 bp, synthetic construct
  misc_feature 1..20: note = Description of Artificial Sequence: Synthetic oligonucleotide
  misc_feature 1..20: note = Target: FXN; (+) strand; PAM type: YTN; PAM sequence: CTT
  source 1..20: mol_type = other DNA
gttgacatgttctttattca

SEQ ID NO: 34304 - DNA, 20 bp, synthetic construct
  misc_feature 1..20: note = Description of Artificial Sequence: Synthetic oligonucleotide
  misc_feature 1..20: note = Target: FXN; (+) strand; PAM type: YTN; PAM sequence: TTG
  source 1..20: mol_type = other DNA
ttgacatgttctttattcac

SEQ ID NO: 34305 - DNA, 20 bp, synthetic construct
  misc_feature 1..20: note = Description of Artificial Sequence: Synthetic oligonucleotide
  misc_feature 1..20: note = Target: FXN; (+) strand; PAM type: YTN; PAM sequence: TTG
  source 1..20: mol_type = other DNA
acatgttctttattcactaa

SEQ ID NO: 34306 - DNA, 20 bp, synthetic construct
  misc_feature 1..20: note = Description of Artificial Sequence: Synthetic oligonucleotide
  misc_feature 1..20: note = Target: FXN; (+) strand; PAM type: YTN; PAM sequence: TTC
  source 1..20: mol_type = other DNA
tttattcactaaggtgtcag

SEQ ID NO: 34307 - DNA, 20 bp, synthetic construct
  misc_feature 1..20: note = Description of Artificial Sequence: Synthetic oligonucleotide
  misc_feature 1..20: note = Target: FXN; (+) strand; PAM type: YTN; PAM sequence: CTT
  source 1..20: mol_type = other DNA
tattcactaaggtgtcagca

SEQ ID NO: 34308 - DNA, 20 bp, synthetic construct
  misc_feature 1..20: note = Description of Artificial Sequence: Synthetic oligonucleotide
  misc_feature 1..20: note = Target: FXN; (+) strand; PAM type: YTN; PAM sequence: TTT
  source 1..20: mol_type = other DNA
attcactaaggtgtcagcat

SEQ ID NO: 34309 - DNA, 20 bp, synthetic construct
  misc_feature 1..20: note = Description of Artificial Sequence: Synthetic oligonucleotide
  misc_feature 1..20: note = Target: FXN; (+) strand; PAM type: YTN; PAM sequence: TTA
  source 1..20: mol_type = other DNA
ttcactaaggtgtcagcata

SEQ ID NO: 34310 - DNA, 20 bp, synthetic construct
  misc_feature 1..20: note = Description of Artificial Sequence: Synthetic oligonucleotide
  misc_feature 1..20: note = Target: FXN; (+) strand; PAM type: YTN; PAM sequence: TTC
  source 1..20: mol_type = other DNA
actaaggtgtcagcatatta

SEQ ID NO: 34311 - DNA, 20 bp, synthetic construct
  misc_feature 1..20: note = Description of Artificial Sequence: Synthetic oligonucleotide
  misc_feature 1..20: note = Target: FXN; (+) strand; PAM type: YTN; PAM sequence: CTA
  source 1..20: mol_type = other DNA
aggtgtcagcatattactgt

SEQ ID NO: 34312 - DNA, 20 bp, synthetic construct
  misc_feature 1..20: note = Description of Artificial Sequence: Synthetic oligonucleotide
  misc_feature 1..20: note = Target: FXN; (+) strand; PAM type: YTN; PAM sequence: TTA
  source 1..20: mol_type = other DNA
ctgtcttagaactgagggtt

SEQ ID NO: 34313 - DNA, 20 bp, synthetic construct
  misc_feature 1..20: note = Description of Artificial Sequence: Synthetic oligonucleotide
  misc_feature 1..20: note = Target: FXN; (+) strand; PAM type: YTN; PAM sequence: CTG
  source 1..20: mol_type = other DNA
tcttagaactgagggttctt

SEQ ID NO: 34314 - DNA, 20 bp, synthetic construct
  misc_feature 1..20: note = Description of Artificial Sequence: Synthetic oligonucleotide
  misc_feature 1..20: note = Target: FXN; (+) strand; PAM type: YTN; PAM sequence: CTT
  source 1..20: mol_type = other DNA
agaactgagggttcttcatc

SEQ ID NO: 34315 - DNA, 20 bp, synthetic construct
  misc_feature 1..20: note = Description of Artificial Sequence: Synthetic oligonucleotide
  misc_feature 1..20: note = Target: FXN; (+) strand; PAM type: YTN; PAM sequence: TTA
  source 1..20: mol_type = other DNA
gaactgagggttcttcatct

SEQ ID NO: 34316 - DNA, 20 bp, synthetic construct
  misc_feature 1..20: note = Description of Artificial Sequence: Synthetic oligonucleotide
  misc_feature 1..20: note = Target: FXN; (+) strand; PAM type: YTN; PAM sequence: CTG
  source 1..20: mol_type = other DNA
agggttcttcatcttttttg

SEQ ID NO: 34317 - DNA, 20 bp, synthetic construct
  misc_feature 1..20: note = Description of Artificial Sequence: Synthetic oligonucleotide
  misc_feature 1..20: note = Target: FXN; (+) strand; PAM type: YTN; PAM sequence: TTC
  source 1..20: mol_type = other DNA
ttcatcttttttggatcagg

SEQ ID NO: 34318 - DNA, 20 bp, synthetic construct
  misc_feature 1..20: note = Description of Artificial Sequence: Synthetic oligonucleotide
  misc_feature 1..20: note = Target: FXN; (+) strand; PAM type: YTN; PAM sequence: CTT
  source 1..20: mol_type = other DNA
catcttttttggatcaggac

SEQ ID NO: 34319 - DNA, 20 bp, synthetic construct
  misc_feature 1..20: note = Description of Artificial Sequence: Synthetic oligonucleotide
  misc_feature 1..20: note = Target: FXN; (+) strand; PAM type: YTN; PAM sequence: TTC
  source 1..20: mol_type = other DNA
atcttttttggatcaggacc

SEQ ID NO: 34320 - DNA, 20 bp, synthetic construct
  misc_feature 1..20: note = Description of Artificial Sequence: Synthetic oligonucleotide
  misc_feature 1..20: note = Target: FXN; (+) strand; PAM type: YTN; PAM sequence: CTT
  source 1..20: mol_type = other DNA
ttttggatcaggacctccct

SEQ ID NO: 34321 - DNA, 20 bp, synthetic construct
  misc_feature 1..20: note = Description of Artificial Sequence: Synthetic oligonucleotide
  misc_feature 1..20: note = Target: FXN; (+) strand; PAM type: YTN; PAM sequence: TTT
  source 1..20: mol_type = other DNA
tttggatcaggacctccctc

SEQ ID NO: 34322 - DNA, 20 bp, synthetic construct
  misc_feature 1..20: note = Description of Artificial Sequence: Synthetic oligonucleotide
  misc_feature 1..20: note = Target: FXN; (+) strand; PAM type: YTN; PAM sequence: TTT
  source 1..20: mol_type = other DNA
ttggatcaggacctccctct

SEQ ID NO: 34323 - DNA, 20 bp, synthetic construct
  misc_feature 1..20: note = Description of Artificial Sequence: Synthetic oligonucleotide
  misc_feature 1..20: note = Target: FXN; (+) strand; PAM type: YTN; PAM sequence: TTT
  source 1..20: mol_type = other DNA
tggatcaggacctccctcta

SEQ ID NO: 34324 - DNA, 20 bp, synthetic construct
  misc_feature 1..20: note = Description of Artificial Sequence: Synthetic oligonucleotide
  misc_feature 1..20: note = Target: FXN; (+) strand; PAM type: YTN; PAM sequence: TTT
  source 1..20: mol_type = other DNA
ggatcaggacctccctctaa

SEQ ID NO: 34325 - DNA, 20 bp, synthetic construct
  misc_feature 1..20: note = Description of Artificial Sequence: Synthetic oligonucleotide
  misc_feature 1..20: note = Target: FXN; (+) strand; PAM type: YTN; PAM sequence: TTG
  source 1..20: mol_type = other DNA
gatcaggacctccctctaag

SEQ ID NO: 34326 - DNA, 20 bp, synthetic construct
  misc_feature 1..20: note = Description of Artificial Sequence: Synthetic oligonucleotide
  misc_feature 1..20: note = Target: FXN; (+) strand; PAM type: YTN; PAM sequence: CTC
  source 1..20: mol_type = other DNA
cctctaagaatctgatgact

SEQ ID NO: 34327 - DNA, 20 bp, synthetic construct
  misc_feature 1..20: note = Description of Artificial Sequence: Synthetic oligonucleotide
  misc_feature 1..20: note = Target: FXN; (+) strand; PAM type: YTN; PAM sequence: CTC
  source 1..20: mol_type = other DNA
taagaatctgatgactgctc

SEQ ID NO: 34328 - DNA, 20 bp, synthetic construct
  misc_feature 1..20: note = Description of Artificial Sequence: Synthetic oligonucleotide
  misc_feature 1..20: note = Target: FXN; (+) strand; PAM type: YTN; PAM sequence: CTA
  source 1..20: mol_type = other DNA
agaatctgatgactgctctg

SEQ ID NO: 34329 - DNA, 20 bp, synthetic construct
  misc_feature 1..20: note = Description of Artificial Sequence: Synthetic oligonucleotide
  misc_feature 1..20: note = Target: FXN; (+) strand; PAM type: YTN; PAM sequence: CTG
  source 1..20: mol_type = other DNA
atgactgctctggtccctct

SEQ ID NO: 34330 - DNA, 20 bp, synthetic construct
  misc_feature 1..20: note = Description of Artificial Sequence: Synthetic oligonucleotide
  misc_feature 1..20: note = Target: FXN; (+) strand; PAM type: YTN; PAM sequence: CTG
  source 1..20: mol_type = other DNA
ctctggtccctctcccaata

SEQ ID NO: 34331 - DNA, 20 bp, synthetic construct
  misc_feature 1..20: note = Description of Artificial Sequence: Synthetic oligonucleotide
  misc_feature 1..20: note = Target: FXN; (+) strand; PAM type: YTN; PAM sequence: CTC
  source 1..20: mol_type = other DNA
tggtccctctcccaataaaa

SEQ ID NO: 34332 - DNA, 20 bp, synthetic construct
  misc_feature 1..20: note = Description of Artificial Sequence: Synthetic oligonucleotide
  misc_feature 1..20: note = Target: FXN; (+) strand; PAM type: YTN; PAM sequence: CTG
  source 1..20: mol_type = other DNA
gtccctctcccaataaaaac

SEQ ID NO: 34333 - DNA, 20 bp, synthetic construct
  misc_feature 1..20: note = Description of Artificial Sequence: Synthetic oligonucleotide
  misc_feature 1..20: note = Target: FXN; (+) strand; PAM type: YTN; PAM sequence: CTC
  source 1..20: mol_type = other DNA
tcccaataaaaacttccata

SEQ ID NO: 34334 - DNA, 20 bp, synthetic construct
  misc_feature 1..20: note = Description of Artificial Sequence: Synthetic oligonucleotide
  misc_feature 1..20: note = Target: FXN; (+) strand; PAM type: YTN; PAM sequence: CTC
  source 1..20: mol_type = other DNA
ccaataaaaacttccatact

SEQ ID NO: 34335 - DNA, 20 bp, synthetic construct
  misc_feature 1..20: note = Description of Artificial Sequence: Synthetic oligonucleotide
  misc_feature 1..20: note = Target: FXN; (+) strand; PAM type: YTN; PAM sequence: CTT
  source 1..20: mol_type = other DNA
ccatactcacctgttaaaaa

SEQ ID NO: 34336 - DNA, 20 bp, synthetic construct
  misc_feature 1..20: note = Description of Artificial Sequence: Synthetic oligonucleotide
  misc_feature 1..20: note = Target: FXN; (+) strand; PAM type: YTN; PAM sequence: TTC
  source 1..20: mol_type = other DNA
catactcacctgttaaaaaa

SEQ ID NO: 34337 - DNA, 20 bp, synthetic construct
  misc_feature 1..20: note = Description of Artificial Sequence: Synthetic oligonucleotide
  misc_feature 1..20: note = Target: FXN; (+) strand; PAM type: YTN; PAM sequence: CTC
  source 1..20: mol_type = other DNA
acctgttaaaaaaaaaaaaa

SEQ ID NO: 34338 - DNA, 20 bp, synthetic construct
  misc_feature 1..20: note = Description of Artificial Sequence: Synthetic oligonucleotide
  misc_feature 1..20: note = Target: FXN; (+) strand; PAM type: YTN; PAM sequence: CTG
  source 1..20: mol_type = other DNA
ttaaaaaaaaaaaaaacttt

SEQ ID NO: 34339 - DNA, 20 bp, synthetic construct
  misc_feature 1..20: note = Description of Artificial Sequence: Synthetic oligonucleotide
  misc_feature 1..20: note = Target: FXN; (+) strand; PAM type: YTN; PAM sequence: TTA
  source 1..20: mol_type = other DNA
aaaaaaaaaaaaactttaaa

SEQ ID NO: 34340 - DNA, 20 bp, synthetic construct
  misc_feature 1..20: note = Description of Artificial Sequence: Synthetic oligonucleotide
  misc_feature 1..20: note = Target: FXN; (+) strand; PAM type: YTN; PAM sequence: CTT
  source 1..20: mol_type = other DNA
taaacaaattaacagagttt

SEQ ID NO: 34341 - DNA, 20 bp, synthetic construct
  misc_feature 1..20: note = Description of Artificial Sequence: Synthetic oligonucleotide
  misc_feature 1..20: note = Target: FXN; (+) strand; PAM type: YTN; PAM sequence: TTT
  source 1..20: mol_type = other DNA
aaacaaattaacagagtttt

SEQ ID NO: 34342 - DNA, 20 bp, synthetic construct
  misc_feature 1..20: note = Description of Artificial Sequence: Synthetic oligonucleotide
  misc_feature 1..20: note = Target: FXN; (+) strand; PAM type: YTN; PAM sequence: TTA
  source 1..20: mol_type = other DNA
aacaaattaacagagtttta

SEQ ID NO: 34343 - DNA, 20 bp, synthetic construct
  misc_feature 1..20: note = Description of Artificial Sequence: Synthetic oligonucleotide
  misc_feature 1..20: note = Target: FXN; (+) strand; PAM type: YTN; PAM sequence: TTA
  source 1..20: mol_type = other DNA
acagagttttattcagcaaa

SEQ ID NO: 34344 - DNA, 20 bp, synthetic construct
  misc_feature 1..20: note = Description of Artificial Sequence: Synthetic oligonucleotide
  misc_feature 1..20: note = Target: FXN; (+) strand; PAM type: YTN; PAM sequence: TTT
  source 1..20: mol_type = other DNA
tattcagcaaagaatgattc

SEQ ID NO: 34345 - DNA, 20 bp, synthetic construct
  misc_feature 1..20: note = Description of Artificial Sequence: Synthetic oligonucleotide
  misc_feature 1..20: note = Target: FXN; (+) strand; PAM type: YTN; PAM sequence: TTT
  source 1..20: mol_type = other DNA
attcagcaaagaatgattca

SEQ ID NO: 34346 - DNA, 20 bp, synthetic construct
  misc_feature 1..20: note = Description of Artificial Sequence: Synthetic oligonucleotide
  misc_feature 1..20: note = Target: FXN; (+) strand; PAM type: YTN; PAM sequence: TTA
  source 1..20: mol_type = other DNA
ttcagcaaagaatgattcat

SEQ ID NO: 34347 - DNA, 20 bp, synthetic construct
  misc_feature 1..20: note = Description of Artificial Sequence: Synthetic oligonucleotide
  misc_feature 1..20: note = Target: FXN; (+) strand; PAM type: YTN; PAM sequence: TTC
  source 1..20: mol_type = other DNA
agcaaagaatgattcataaa

SEQ ID NO: 34348 - DNA, 20 bp, synthetic construct
  misc_feature 1..20: note = Description of Artificial Sequence: Synthetic oligonucleotide
  misc_feature 1..20: note = Target: FXN; (+) strand; PAM type: YTN; PAM sequence: TTC
  source 1..20: mol_type = other DNA
ataaatcgggaaggctgcaa

SEQ ID NO: 34349 - DNA, 20 bp, synthetic construct
  misc_feature 1..20: note = Description of Artificial Sequence: Synthetic oligonucleotide
  misc_feature 1..20: note = Target: FXN; (+) strand; PAM type: YTN; PAM sequence: CTG
  source 1..20: mol_type = other DNA
caaccagaataggttcagag

SEQ ID NO: 34350 - DNA, 20 bp, synthetic construct
  misc_feature 1..20: note = Description of Artificial Sequence: Synthetic oligonucleotide
  misc_feature 1..20: note = Target: FXN; (+) strand; PAM type: YTN; PAM sequence: TTC
  source 1..20: mol_type = other DNA
agagagactccacggtgtgc

SEQ ID NO: 34351 - DNA, 20 bp, synthetic construct
  misc_feature 1..20: note = Description of Artificial Sequence: Synthetic oligonucleotide
  misc_feature 1..20: note = Target: FXN; (+) strand; PAM type: YTN; PAM sequence: CTC
  source 1..20: mol_type = other DNA
cacggtgtgccacgtggttg

SEQ ID NO: 34352 - DNA, 20 bp, synthetic construct
  misc_feature 1..20: note = Description of Artificial Sequence: Synthetic oligonucleotide
  misc_feature 1..20: note = Target: FXN; (+) strand; PAM type: YTN; PAM sequence: TTG
  source 1..20: mol_type = other DNA
gagaggatttaggatttatg

SEQ ID NO: 34353 - DNA, 20 bp, synthetic construct
  misc_feature 1..20: note = Description of Artificial Sequence: Synthetic oligonucleotide
  misc_feature 1..20: note = Target: FXN; (+) strand; PAM type: YTN; PAM sequence: TTT
  source 1..20: mol_type = other DNA
aggatttatgcacagaaaaa

SEQ ID NO: 34354 - DNA, 20 bp, synthetic construct
  misc_feature 1..20: note = Description of Artificial Sequence: Synthetic oligonucleotide
  misc_feature 1..20: note = Target: FXN; (+) strand; PAM type: YTN; PAM sequence: TTA
  source 1..20: mol_type = other DNA
ggatttatgcacagaaaaag

SEQ ID NO: 34355 - DNA, 20 bp, synthetic construct
  misc_feature 1..20: note = Description of Artificial Sequence: Synthetic oligonucleotide
  misc_feature 1..20: note = Target: FXN; (+) strand; PAM type: YTN; PAM sequence: TTT
  source 1..20: mol_type = other DNA
atgcacagaaaaaggaaagt

SEQ ID NO: 34356 - DNA, 20 bp, synthetic construct
  misc_feature 1..20: note = Description of Artificial Sequence: Synthetic oligonucleotide
  misc_feature 1..20: note = Target: FXN; (+) strand; PAM type: YTN; PAM sequence: TTA
  source 1..20: mol_type = other DNA
tgcacagaaaaaggaaagtg

SEQ ID NO: 34357 - DNA, 20 bp, synthetic construct
  misc_feature 1..20: note = Description of Artificial Sequence: Synthetic oligonucleotide
  misc_feature 1..20: note = Target: FXN; (+) strand; PAM type: YTN; PAM sequence: CTG
  source 1..20: mol_type = other DNA
gtgctggtgcggtgcctcac

SEQ ID NO: 34358 - DNA, 20 bp, synthetic construct
  misc_feature 1..20: note = Description of Artificial Sequence: Synthetic oligonucleotide
  misc_feature 1..20: note = Target: FXN; (+) strand; PAM type: YTN; PAM sequence: CTG
  source 1..20: mol_type = other DNA
gtgcggtgcctcacgcctgt

SEQ ID NO: 34359 - DNA, 20 bp, synthetic construct
  misc_feature 1..20: note = Description of Artificial Sequence: Synthetic oligonucleotide
  misc_feature 1..20: note = Target: FXN; (+) strand; PAM type: YTN; PAM sequence: CTC
  source 1..20: mol_type = other DNA
acgcctgtaatcccagcact

SEQ ID NO: 34360 - DNA, 20 bp, synthetic construct
  misc_feature 1..20: note = Description of Artificial Sequence: Synthetic oligonucleotide
  misc_feature 1..20: note = Target: FXN; (+) strand; PAM type: YTN; PAM sequence: CTG
  source 1..20: mol_type = other DNA
taatcccagcactttgggag

SEQ ID NO: 34361 - DNA, 20 bp, synthetic construct
  misc_feature 1..20: note = Description of Artificial Sequence: Synthetic oligonucleotide
  misc_feature 1..20: note = Target: FXN; (+) strand; PAM type: YTN; PAM sequence: CTT
  source 1..20: mol_type = other DNA
tgggaggccgaggcgggcag

SEQ ID NO: 34362 - DNA, 20 bp, synthetic construct
  misc_feature 1..20: note = Description of Artificial Sequence: Synthetic oligonucleotide
  misc_feature 1..20: note = Target: FXN; (+) strand; PAM type: YTN; PAM sequence: TTT
  source 1..20: mol_type = other DNA
gggaggccgaggcgggcaga

SEQ ID NO: 34363 - DNA, 20 bp, synthetic construct
  misc_feature 1..20: note = Description of Artificial Sequence: Synthetic oligonucleotide
  misc_feature 1..20: note = Target: FXN; (+) strand; PAM type: YTN; PAM sequence: TTG
  source 1..20: mol_type = other DNA
ggaggccgaggcgggcagat

SEQ ID NO: 34364 - DNA, 20 bp, synthetic construct
  misc_feature 1..20: note = Description of Artificial Sequence: Synthetic oligonucleotide
  misc_feature 1..20: note = Target: FXN; (+) strand; PAM type: YTN; PAM sequence: CTG
  source 1..20: mol_type = other DNA
gctaacacggtgaaaccctg

SEQ ID NO: 34365 - DNA, 20 bp, synthetic construct
  misc_feature 1..20: note = Description of Artificial Sequence: Synthetic oligonucleotide
  misc_feature 1..20: note = Target: FXN; (+) strand; PAM type: YTN; PAM sequence: CTA
  source 1..20: mol_type = other DNA
acacggtgaaaccctgtctc

SEQ ID NO: 34366 - DNA, 20 bp, synthetic construct
  misc_feature 1..20: note = Description of Artificial Sequence: Synthetic oligonucleotide
  misc_feature 1..20: note = Target: FXN; (+) strand; PAM type: YTN; PAM sequence: CTG
  source 1..20: mol_type = other DNA
tctctactaaaaatgcaaaa

SEQ ID NO: 34367 - DNA, 20 bp, synthetic construct
  misc_feature 1..20: note = Description of Artificial Sequence: Synthetic oligonucleotide
  misc_feature 1..20: note = Target: FXN; (+) strand; PAM type: YTN; PAM sequence: CTC
  source 1..20: mol_type = other DNA
tactaaaaatgcaaaaactt

SEQ ID NO: 34368 - DNA, 20 bp, synthetic construct
  misc_feature 1..20: note = Description of Artificial Sequence: Synthetic oligonucleotide
  misc_feature 1..20: note = Target: FXN; (+) strand; PAM type: YTN; PAM sequence: CTA
  source 1..20: mol_type = other DNA
ctaaaaatgcaaaaacttag

SEQ ID NO: 34369 - DNA, 20 bp, synthetic construct
  misc_feature 1..20: note = Description of Artificial Sequence: Synthetic oligonucleotide
  misc_feature 1..20: note = Target: FXN; (+) strand; PAM type: YTN; PAM sequence: CTA
  source 1..20: mol_type = other DNA
aaaatgcaaaaacttagccg

SEQ ID NO: 34370 - DNA, 20 bp, synthetic construct
  misc_feature 1..20: note = Description of Artificial Sequence: Synthetic oligonucleotide
  misc_feature 1..20: note = Target: FXN; (+) strand; PAM type: YTN; PAM sequence: CTT
  source 1..20: mol_type = other DNA
agccgggcgtggtggcaggc

SEQ ID NO: 34371 - DNA, 20 bp, synthetic construct
  misc_feature 1..20: note = Description of Artificial Sequence: Synthetic oligonucleotide
  misc_feature 1..20: note = Target: FXN; (+) strand; PAM type: YTN; PAM sequence: TTA
  source 1..20: mol_type = other DNA
gccgggcgtggtggcaggca

SEQ ID NO: 34372 - DNA, 20 bp, synthetic construct
  misc_feature 1..20: note = Description of Artificial Sequence: Synthetic oligonucleotide
  misc_feature 1..20: note = Target: FXN; (+) strand; PAM type: YTN; PAM sequence: CTG
  source 1..20: mol_type = other DNA
tagtcccagctacttgggag

SEQ ID NO: 34373 - DNA, 20 bp, synthetic construct
  misc_feature 1..20: note = Description of Artificial Sequence: Synthetic oligonucleotide
  misc_feature 1..20: note = Target: FXN; (+) strand; PAM type: YTN; PAM sequence: CTA
  source 1..20: mol_type = other DNA
cttgggaggctgaggcagga

SEQ ID NO: 34374 - DNA, 20 bp, synthetic construct
  misc_feature 1..20: note = Description of Artificial Sequence: Synthetic oligonucleotide
  misc_feature 1..20: note = Target: FXN; (+) strand; PAM type: YTN; PAM sequence: CTT
  source 1..20: mol_type = other DNA
gggaggctgaggcaggagaa

SEQ ID NO: 34375 - DNA, 20 bp, synthetic construct
  misc_feature 1..20: note = Description of Artificial Sequence: Synthetic oligonucleotide
  misc_feature 1..20: note = Target: FXN; (+) strand; PAM type: YTN; PAM sequence: TTG
  source 1..20: mol_type = other DNA
ggaggctgaggcaggagaat

SEQ ID NO: 34376 - DNA, 20 bp, synthetic construct
  misc_feature 1..20: note = Description of Artificial Sequence: Synthetic oligonucleotide
  misc_feature 1..20: note = Target: FXN; (+) strand; PAM type: YTN; PAM sequence: CTG
  source 1..20: mol_type = other DNA
aggcaggagaatggtgtgaa

SEQ ID NO: 34377 - DNA, 20 bp, synthetic construct
  misc_feature 1..20: note = Description of Artificial Sequence: Synthetic oligonucleotide
  misc_feature 1..20: note = Target: FXN; (+) strand; PAM type: YTN; PAM sequence: CTG
  source 1..20: mol_type = other DNA
ggaggcggagcttgcagtga

SEQ ID NO: 34378 - DNA, 20 bp, synthetic construct
  misc_feature 1..20: note = Description of Artificial Sequence: Synthetic oligonucleotide
  misc_feature 1..20: note = Target: FXN; (+) strand; PAM type: YTN; PAM sequence: CTT
  source 1..20: mol_type = other DNA
gcagtgagccaggatcccgc

SEQ ID NO: 34379 - DNA, 20 bp, synthetic construct
  misc_feature 1..20: note = Description of Artificial Sequence: Synthetic oligonucleotide
  misc_feature 1..20: note = Target: FXN; (+) strand; PAM type: YTN; PAM sequence: TTG
  source 1..20: mol_type = other DNA
cagtgagccaggatcccgcc

SEQ ID NO: 34380 - DNA, 20 bp, synthetic construct
  misc_feature 1..20: note = Description of Artificial Sequence: Synthetic oligonucleotide
  misc_feature 1..20: note = Target: FXN; (+) strand; PAM type: YTN; PAM sequence: CTG
  source 1..20: mol_type = other DNA
cactccagcctgggcgacag

SEQ ID NO: 34381 - DNA, 20 bp, synthetic construct
  misc_feature 1..20: note = Description of Artificial Sequence: Synthetic oligonucleotide
  misc_feature 1..20: note = Target: FXN; (+) strand; PAM type: YTN; PAM sequence: CTC
  source 1..20: mol_type = other DNA
cagcctgggcgacagagcga

SEQ ID NO: 34382 - DNA, 20 bp, synthetic construct
  misc_feature 1..20: note = Description of Artificial Sequence: Synthetic oligonucleotide
  misc_feature 1..20: note = Target: FXN; (+) strand; PAM type: YTN; PAM sequence: CTG
  source 1..20: mol_type = other DNA
ggcgacagagcgagacttca

SEQ ID NO: 34383 - DNA, 20 bp, synthetic construct
  misc_feature 1..20: note = Description of Artificial Sequence: Synthetic oligonucleotide
  misc_feature 1..20: note = Target: FXN; (+) strand; PAM type: YTN; PAM sequence: CTT
  source 1..20: mol_type = other DNA
catcttaaaaaaaaagaaaa

SEQ ID NO: 34384 - DNA, 20 bp, synthetic construct
  misc_feature 1..20: note = Description of Artificial Sequence: Synthetic oligonucleotide
  misc_feature 1..20: note = Target: FXN; (+) strand; PAM type: YTN; PAM sequence: TTC
  source 1..20: mol_type = other DNA
atcttaaaaaaaaagaaaag

SEQ ID NO: 34385 - DNA, 20 bp, synthetic construct
  misc_feature 1..20: note = Description of Artificial Sequence: Synthetic oligonucleotide
  misc_feature 1..20: note = Target: FXN; (+) strand; PAM type: YTN; PAM sequence: CTT
  source 1..20: mol_type = other DNA
aaaaaaaaagaaaagaaaaa

SEQ ID NO: 34386 - DNA, 20 bp, synthetic construct
  misc_feature 1..20: note = Description of Artificial Sequence: Synthetic oligonucleotide
  misc_feature 1..20: note = Target: FXN; (+) strand; PAM type: YTN; PAM sequence: TTA
  source 1..20: mol_type = other DNA
aaaaaaaagaaaagaaaaag

SEQ ID NO: 34387 - DNA, 20 bp, synthetic construct
  misc_feature 1..20: note = Description of Artificial Sequence: Synthetic oligonucleotide
  misc_feature 1..20: note = Target: FXN; (+) strand; PAM type: YTN; PAM sequence: TTG
  source 1..20: mol_type = other DNA
gttacagcttggtgtttgcc

SEQ ID NO: 34388 - DNA, 20 bp, synthetic construct
  misc_feature 1..20: note = Description of Artificial Sequence: Synthetic oligonucleotide
  misc_feature 1..20: note = Target: FXN; (+) strand; PAM type: YTN; PAM sequence: TTA
  source 1..20: mol_type = other DNA
cagcttggtgtttgccttaa

SEQ ID NO: 34389 - DNA, 20 bp, synthetic construct
  misc_feature 1..20: note = Description of Artificial Sequence: Synthetic oligonucleotide
  misc_feature 1..20: note = Target: FXN; (+) strand; PAM type: YTN; PAM sequence: CTT
  source 1..20: mol_type = other DNA
ggtgtttgccttaaacttgg

SEQ ID NO: 34390 - DNA, 20 bp, synthetic construct
  misc_feature 1..20: note = Description of Artificial Sequence: Synthetic oligonucleotide
  misc_feature 1..20: note = Target: FXN; (+) strand; PAM type: YTN; PAM sequence: TTG
  source 1..20: mol_type = other DNA
gtgtttgccttaaacttggt

SEQ ID NO: 34391 - DNA, 20 bp, synthetic construct
  misc_feature 1..20: note = Description of Artificial Sequence: Synthetic oligonucleotide
  misc_feature 1..20: note = Target: FXN; (+) strand; PAM type: YTN; PAM sequence: TTT
  source 1..20: mol_type = other DNA
gccttaaacttggtttgaac

SEQ ID NO: 34392 - DNA, 20 bp, synthetic construct
  misc_feature 1..20: note = Description of Artificial Sequence: Synthetic oligonucleotide
  misc_feature 1..20: note = Target: FXN; (+) strand; PAM type: YTN; PAM sequence: TTG
  source 1..20: mol_type = other DNA
ccttaaacttggtttgaaca

SEQ ID NO: 34393 - DNA, 20 bp, synthetic construct
  misc_feature 1..20: note = Description of Artificial Sequence: Synthetic oligonucleotide
  misc_feature 1..20: note = Target: FXN; (+) strand; PAM type: YTN; PAM sequence: CTT
  source 1..20: mol_type = other DNA
aaacttggtttgaacagttg

SEQ ID NO: 34394 - DNA, 20 bp, synthetic construct
  misc_feature 1..20: note = Description of Artificial Sequence: Synthetic oligonucleotide
  misc_feature 1..20: note = Target: FXN; (+) strand; PAM type: YTN; PAM sequence: TTA
  source 1..20: mol_type = other DNA
aacttggtttgaacagttgg

SEQ ID NO: 34395 - DNA, 20 bp, synthetic construct
  misc_feature 1..20: note = Description of Artificial Sequence: Synthetic oligonucleotide
  misc_feature 1..20: note = Target: FXN; (+) strand; PAM type: YTN; PAM sequence: CTT
  source 1..20: mol_type = other DNA
ggtttgaacagttggccgcc

SEQ ID NO: 34396 - DNA, 20 bp, synthetic construct
  misc_feature 1..20: note = Description of Artificial Sequence: Synthetic oligonucleotide
  misc_feature 1..20: note = Target: FXN; (+) strand; PAM type: YTN; PAM sequence: TTG
  source 1..20: mol_type = other DNA
gtttgaacagttggccgcct

SEQ ID NO: 34397 - DNA, 20 bp, synthetic construct
  misc_feature 1..20: note = Description of Artificial Sequence: Synthetic oligonucleotide
  misc_feature 1..20: note = Target: FXN; (+) strand; PAM type: YTN; PAM sequence: TTT
  source 1..20: mol_type = other DNA
gaacagttggccgcctttga

SEQ ID NO: 34398 - DNA, 20 bp, synthetic construct
  misc_feature 1..20: note = Description of Artificial Sequence: Synthetic oligonucleotide
  misc_feature 1..20: note = Target: FXN; (+) strand; PAM type: YTN; PAM sequence: TTG
  source 1..20: mol_type = other DNA
aacagttggccgcctttgat

SEQ ID NO: 34399 - DNA, 20 bp, synthetic construct
  misc_feature 1..20: note = Description of Artificial Sequence: Synthetic oligonucleotide
  misc_feature 1..20: note = Target: FXN; (+) strand; PAM type: YTN; PAM sequence: TTG
  source 1..20: mol_type = other DNA
gccgcctttgattagccaaa

SEQ ID NO: 34400 - DNA, 20 bp, synthetic construct
  misc_feature 1..20: note = Description of Artificial Sequence: Synthetic oligonucleotide
  misc_feature 1..20: note = Target: FXN; (+) strand; PAM type: YTN; PAM sequence: CTT
  source 1..20: mol_type = other DNA
tgattagccaaaactcggtg

SEQ ID NO: 34401 - DNA, 20 bp, synthetic construct
  misc_feature 1..20: note = Description of Artificial Sequence: Synthetic oligonucleotide
  misc_feature 1..20: note = Target: FXN; (+) strand; PAM type: YTN; PAM sequence: TTT
  source 1..20: mol_type = other DNA
gattagccaaaactcggtga

SEQ ID NO: 34402 - DNA, 20 bp, synthetic construct
  misc_feature 1..20: note = Description of Artificial Sequence: Synthetic oligonucleotide
  misc_feature 1..20: note = Target: FXN; (+) strand; PAM type: YTN; PAM sequence: TTG
  source 1..20: mol_type = other DNA
attagccaaaactcggtgat

SEQ ID NO: 34403 - DNA, 20 bp, synthetic construct
  misc_feature 1..20: note = Description of Artificial Sequence: Synthetic oligonucleotide
  misc_feature 1..20: note = Target: FXN; (+) strand; PAM type: YTN; PAM sequence: TTA
  source 1..20: mol_type = other DNA
gccaaaactcggtgattggt

SEQ ID NO: 34404 - DNA, 20 bp, synthetic construct
  misc_feature 1..20: note = Description of Artificial Sequence: Synthetic oligonucleotide
  misc_feature 1..20: note = Target: FXN; (+) strand; PAM type: YTN; PAM sequence: CTC
  source 1..20: mol_type = other DNA
ggtgattggtacaagagtag

SEQ ID NO: 34405 - DNA, 20 bp, synthetic construct
  misc_feature 1..20: note = Description of Artificial Sequence: Synthetic oligonucleotide
  misc_feature 1..20: note = Target: FXN; (+) strand; PAM type: YTN; PAM sequence: TTG
  source 1..20: mol_type = other DNA
gtacaagagtagattgcagt

SEQ ID NO: 34406 - DNA, 20 bp, synthetic construct
  misc_feature 1..20: note = Description of Artificial Sequence: Synthetic oligonucleotide
  misc_feature 1..20: note = Target: FXN; (+) strand; PAM type: YTN; PAM sequence: TTG
  source 1..20: mol_type = other DNA
cagttcactatgtacagaga

SEQ ID NO: 34407 - DNA, 20 bp, synthetic construct
  misc_feature 1..20: note = Description of Artificial Sequence: Synthetic oligonucleotide
  misc_feature 1..20: note = Target: FXN; (+) strand; PAM type: YTN; PAM sequence: TTC
  source 1..20: mol_type = other DNA
actatgtacagagaagccct

SEQ ID NO: 34408 - DNA, 20 bp, synthetic construct
  misc_feature 1..20: note = Description of Artificial Sequence: Synthetic oligonucleotide
  misc_feature 1..20: note = Target: FXN; (+) strand; PAM type: YTN; PAM sequence: CTA
  source 1..20: mol_type = other DNA
tgtacagagaagcccttaga

SEQ ID NO: 34409 - DNA, 20 bp, synthetic construct
  misc_feature 1..20: note = Description of Artificial Sequence: Synthetic oligonucleotide
  misc_feature 1..20: note = Target: FXN; (+) strand; PAM type: YTN; PAM sequence: CTT
  source 1..20: mol_type = other DNA
agatccgaactcaaaatagg

SEQ ID NO: 34410 - DNA, 20 bp, synthetic construct
  misc_feature 1..20: note = Description of Artificial Sequence: Synthetic oligonucleotide
  misc_feature 1..20: note = Target: FXN; (+) strand; PAM type: YTN; PAM sequence: TTA
  source 1..20: mol_type = other DNA
gatccgaactcaaaataggt

SEQ ID NO: 34411 - DNA, 20 bp, synthetic construct
  misc_feature 1..20: note = Description of Artificial Sequence: Synthetic oligonucleotide
  misc_feature 1..20: note = Target: FXN; (+) strand; PAM type: YTN; PAM sequence: CTC
  source 1..20: mol_type = other DNA
aaaataggtaaggaggcagt

SEQ ID NO: 34412 - DNA, 20 bp, synthetic construct
  misc_feature 1..20: note = Description of Artificial Sequence: Synthetic oligonucleotide
  misc_feature 1..20: note = Target: FXN; (+) strand; PAM type: YTN; PAM sequence: TTT
  source 1..20: mol_type = other DNA
tagctacacttaagttaaca

SEQ ID NO: 34413 - DNA, 20 bp, synthetic construct
  misc_feature 1..20: note = Description of Artificial Sequence: Synthetic oligonucleotide
  misc_feature 1..20: note = Target: FXN; (+) strand; PAM type: YTN; PAM sequence: TTT
  source 1..20: mol_type = other DNA
agctacacttaagttaacat

SEQ ID NO: 34414 - DNA, 20 bp, synthetic construct
  misc_feature 1..20: note = Description of Artificial Sequence: Synthetic oligonucleotide
  misc_feature 1..20: note = Target: FXN; (+) strand; PAM type: YTN; PAM sequence: TTA
  source 1..20: mol_type = other DNA
gctacacttaagttaacata

SEQ ID NO: 34415 - DNA, 20 bp, synthetic construct
  misc_feature 1..20: note = Description of Artificial Sequence: Synthetic oligonucleotide
  misc_feature 1..20: note = Target: FXN; (+) strand; PAM type: YTN; PAM sequence: CTA
  source 1..20: mol_type = other DNA
cacttaagttaacatactca

SEQ ID NO: 34416 - DNA, 20 bp, synthetic construct
  misc_feature 1..20: note = Description of Artificial Sequence: Synthetic oligonucleotide
  misc_feature 1..20: note = Target: FXN; (+) strand; PAM type: YTN; PAM sequence: CTT
  source 1..20: mol_type = other DNA
aagttaacatactcaggagt

SEQ ID NO: 34417 - DNA, 20 bp, synthetic construct
  misc_feature 1..20: note = Description of Artificial Sequence: Synthetic oligonucleotide
  misc_feature 1..20: note = Target: FXN; (+) strand; PAM type: YTN; PAM sequence: TTA
  source 1..20: mol_type = other DNA
agttaacatactcaggagta

SEQ ID NO: 34418 - DNA, 20 bp, synthetic construct
  misc_feature 1..20: note = Description of Artificial Sequence: Synthetic oligonucleotide
  misc_feature 1..20: note = Target: FXN; (+) strand; PAM type: YTN; PAM sequence: TTA
  source 1..20: mol_type = other DNA
acatactcaggagtaccatt

SEQ ID NO: 34419 - DNA, 20 bp, synthetic construct
  misc_feature 1..20: note = Description of Artificial Sequence: Synthetic oligonucleotide
  misc_feature 1..20: note = Target: FXN; (+) strand; PAM type: YTN; PAM sequence: CTC
  source 1..20: mol_type = other DNA
aggagtaccattccagcttc

SEQ ID NO: 34420 - DNA, 20 bp, synthetic construct
  misc_feature 1..20: note = Description of Artificial Sequence: Synthetic oligonucleotide
  misc_feature 1..20: note = Target: FXN; (+) strand; PAM type: YTN; PAM sequence: TTC
  source 1..20: mol_type = other DNA
cagcttcaagctggaagtgt

SEQ ID NO: 34421 - DNA, 20 bp, synthetic construct
  misc_feature 1..20: note = Description of Artificial Sequence: Synthetic oligonucleotide
  misc_feature 1..20: note = Target: FXN; (+) strand; PAM type: YTN; PAM sequence: CTT
  source 1..20: mol_type = other DNA
caagctggaagtgtctgcag

SEQ ID NO: 34422 - DNA, 20 bp, synthetic construct
  misc_feature 1..20: note = Description of Artificial Sequence: Synthetic oligonucleotide
  misc_feature 1..20: note = Target: FXN; (+) strand; PAM type: YTN; PAM sequence: TTC
  source 1..20: mol_type = other DNA
aagctggaagtgtctgcagc

SEQ ID NO: 34423 - DNA, 20 bp, synthetic construct
  misc_feature 1..20: note = Description of Artificial Sequence: Synthetic oligonucleotide
  misc_feature 1..20: note = Target: FXN; (+) strand; PAM type: YTN; PAM sequence: CTG
  source 1..20: mol_type = other DNA
gaagtgtctgcagccccctg

SEQ ID NO: 34424 - DNA, 20 bp, synthetic construct
  misc_feature 1..20: note = Description of Artificial Sequence: Synthetic oligonucleotide
  misc_feature 1..20: note = Target: FXN; (+) strand; PAM type: YTN; PAM sequence: CTG
  source 1..20: mol_type = other DNA
cagccccctgagaccactta

SEQ ID NO: 34425 - DNA, 20 bp, synthetic construct
  misc_feature 1..20: note = Description of Artificial Sequence: Synthetic oligonucleotide
  misc_feature 1..20: note = Target: FXN; (+) strand; PAM type: YTN; PAM sequence: CTG
  source 1..20: mol_type = other DNA
agaccacttaatcccaagtt

SEQ ID NO: 34426 - DNA, 20 bp, synthetic construct
  misc_feature 1..20: note = Description of Artificial Sequence: Synthetic oligonucleotide
  misc_feature 1..20: note = Target: FXN; (+) strand; PAM type: YTN; PAM sequence: CTT
  source 1..20: mol_type = other DNA
aatcccaagttaaaaacccc

SEQ ID NO: 34427 - DNA, 20 bp, synthetic construct
  misc_feature 1..20: note = Description of Artificial Sequence: Synthetic oligonucleotide
  misc_feature 1..20: note = Target: FXN; (+) strand; PAM type: YTN; PAM sequence: TTA
  source 1..20: mol_type = other DNA
atcccaagttaaaaacccct

SEQ ID NO: 34428 - DNA, 20 bp, synthetic construct
  misc_feature 1..20: note = Description of Artificial Sequence: Synthetic oligonucleotide
  misc_feature 1..20: note = Target: FXN; (+) strand; PAM type: YTN; PAM sequence: TTA
  source 1..20: mol_type = other DNA
aaaacccctgctcagaggca

SEQ ID NO: 34429 - DNA, 20 bp, synthetic construct
  misc_feature 1..20: note = Description of Artificial Sequence: Synthetic oligonucleotide
  misc_feature 1..20: note = Target: FXN; (+) strand; PAM type: YTN; PAM sequence: CTG
  source 1..20: mol_type = other DNA
ctcagaggcagcatcttttt

SEQ ID NO: 34430 - DNA, 20 bp, synthetic construct
  misc_feature 1..20: note = Description of Artificial Sequence: Synthetic oligonucleotide
  misc_feature 1..20: note = Target: FXN; (+) strand; PAM type: YTN; PAM sequence: CTC
  source 1..20: mol_type = other DNA
agaggcagcatctttttttt

SEQ ID NO: 34431 - DNA, 20 bp, synthetic construct
  misc_feature 1..20: note = Description of Artificial Sequence: Synthetic oligonucleotide
  misc_feature 1..20: note = Target: FXN; (+) strand; PAM type: YTN; PAM sequence: CTT
  source 1..20: mol_type = other DNA
tttttttttttttttttttt

SEQ ID NO: 34432 - DNA, 20 bp, synthetic construct
  misc_feature 1..20: note = Description of Artificial Sequence: Synthetic oligonucleotide
  misc_feature 1..20: note = Target: FXN; (+) strand; PAM type: YTN; PAM sequence: TTT
  source 1..20: mol_type = other DNA
tttttttttttttttttttt

SEQ ID NO: 34433 - DNA, 20 bp, synthetic construct
  misc_feature 1..20: note = Description of Artificial Sequence: Synthetic oligonucleotide
  misc_feature 1..20: note = Target: FXN; (+) strand; PAM type: YTN; PAM sequence: TTT
  source 1..20: mol_type = other DNA
tttttttttttttttttttt

SEQ ID NO: 34434 - DNA, 20 bp, synthetic construct
  misc_feature 1..20: note = Description of Artificial Sequence: Synthetic oligonucleotide
  misc_feature 1..20: note = Target: FXN; (+) strand; PAM type: YTN; PAM sequence: TTT
  source 1..20: mol_type = other DNA
tttttttttttttttttttt

SEQ ID NO: 34435 - DNA, 20 bp, synthetic construct
  misc_feature 1..20: note = Description of Artificial Sequence: Synthetic oligonucleotide
  misc_feature 1..20: note = Target: FXN; (+) strand; PAM type: YTN; PAM sequence: TTT
  source 1..20: mol_type = other DNA
tttttttttttttttttttt

SEQ ID NO: 34436 - DNA, 20 bp, synthetic construct
  misc_feature 1..20: note = Description of Artificial Sequence: Synthetic oligonucleotide
  misc_feature 1..20: note = Target: FXN; (+) strand; PAM type: YTN; PAM sequence: TTT
  source 1..20: mol_type = other DNA
tttttttttttttttttttt

SEQ ID NO: 34437 - DNA, 20 bp, synthetic construct
  misc_feature 1..20: note = Description of Artificial Sequence: Synthetic oligonucleotide
  misc_feature 1..20: note = Target: FXN; (+) strand; PAM type: YTN; PAM sequence: TTT
  source 1..20: mol_type = other DNA
tttttttttttttttttttg

SEQ ID NO: 34438 - DNA, 20 bp, synthetic construct
  misc_feature 1..20: note = Description of Artificial Sequence: Synthetic oligonucleotide
  misc_feature 1..20: note = Target: FXN; (+) strand; PAM type: YTN; PAM sequence: TTT
  source 1..20: mol_type = other DNA
ttttttttttttttttttga

SEQ ID NO: 34439 - DNA, 20 bp, synthetic construct
  misc_feature 1..20: note = Description of Artificial Sequence: Synthetic oligonucleotide
  misc_feature 1..20: note = Target: FXN; (+) strand; PAM type: YTN; PAM sequence: TTT
  source 1..20: mol_type = other DNA
tttttttttttttttttgag

SEQ ID NO: 34440 - DNA, 20 bp, synthetic construct
  misc_feature 1..20: note = Description of Artificial Sequence: Synthetic oligonucleotide
  misc_feature 1..20: note = Target: FXN; (+) strand; PAM type: YTN; PAM sequence: TTT
  source 1..20: mol_type = other DNA
ttttttttttttttttgaga

SEQ ID NO: 34441 - DNA, 20 bp, synthetic construct
  misc_feature 1..20: note = Description of Artificial Sequence: Synthetic oligonucleotide
  misc_feature 1..20: note = Target: FXN; (+) strand; PAM type: YTN; PAM sequence: TTT
  source 1..20: mol_type = other DNA
tttttttttttttttgagag

SEQ ID NO: 34442 - DNA, 20 bp, synthetic construct
  misc_feature 1..20: note = Description of Artificial Sequence: Synthetic oligonucleotide
  misc_feature 1..20: note = Target: FXN; (+) strand; PAM type: YTN; PAM sequence: TTT
  source 1..20: mol_type = other DNA
ttttttttttttttgagaga

SEQ ID NO: 34443 - DNA, 20 bp, synthetic construct
  misc_feature 1..20: note = Description of Artificial Sequence: Synthetic oligonucleotide
  misc_feature 1..20: note = Target: FXN; (+) strand; PAM type: YTN; PAM sequence: TTT
  source 1..20: mol_type = other DNA
tttttttttttttgagagag

SEQ ID NO: 34444 - DNA, 20 bp, synthetic construct
  misc_feature 1..20: note = Description of Artificial Sequence: Synthetic oligonucleotide
  misc_feature 1..20: note = Target: FXN; (+) strand; PAM type: YTN; PAM sequence: TTT
  source 1..20: mol_type = other DNA
ttttttttttttgagagaga

SEQ ID NO: 34445 - DNA, 20 bp, synthetic construct
  misc_feature 1..20: note = Description of Artificial Sequence: Synthetic oligonucleotide
  misc_feature 1..20: note = Target: FXN; (+) strand; PAM type: YTN; PAM sequence: TTT
  source 1..20: mol_type = other DNA
tttttttttttgagagagat

SEQ ID NO: 34446 - DNA, 20 bp, synthetic construct
  misc_feature 1..20: note = Description of Artificial Sequence: Synthetic oligonucleotide
  misc_feature 1..20: note = Target: FXN; (+) strand; PAM type: YTN; PAM sequence: TTT
  source 1..20: mol_type = other DNA
ttttttttttgagagagatc

SEQ ID NO: 34447 - DNA, 20 bp, synthetic construct
  misc_feature 1..20: note = Description of Artificial Sequence: Synthetic oligonucleotide
  misc_feature 1..20: note = Target: FXN; (+) strand; PAM type: YTN; PAM sequence: TTT
  source 1..20: mol_type = other DNA
tttttttttgagagagatct

SEQ ID NO: 34448 - DNA, 20 bp, synthetic construct
  misc_feature 1..20: note = Description of Artificial Sequence: Synthetic oligonucleotide
  misc_feature 1..20: note = Target: FXN; (+) strand; PAM type: YTN; PAM sequence: TTT
  source 1..20: mol_type = other DNA
ttttttttgagagagatctc

SEQ ID NO: 34449 - DNA, 20 bp, synthetic construct
  misc_feature 1..20: note = Description of Artificial Sequence: Synthetic oligonucleotide
  misc_feature 1..20: note = Target: FXN; (+) strand; PAM type: YTN; PAM sequence: TTT
  source 1..20: mol_type = other DNA
tttttttgagagagatctca

SEQ ID NO: 34450 - DNA, 20 bp, synthetic construct
  misc_feature 1..20: note = Description of Artificial Sequence: Synthetic oligonucleotide
  misc_feature 1..20: note = Target: FXN; (+) strand; PAM type: YTN; PAM sequence: TTT
  source 1..20: mol_type = other DNA
ttttttgagagagatctcac

SEQ ID NO: 34451 - DNA, 20 bp, synthetic construct
  misc_feature 1..20: note = Description of Artificial Sequence: Synthetic oligonucleotide
  misc_feature 1..20: note = Target: FXN; (+) strand; PAM type: YTN; PAM sequence: TTT
  source 1..20: mol_type = other DNA
tttttgagagagatctcact

SEQ ID NO: 34452 - DNA, 20 bp, synthetic construct
  misc_feature 1..20: note = Description of Artificial Sequence: Synthetic oligonucleotide
  misc_feature 1..20: note = Target: FXN; (+) strand; PAM type: YTN; PAM sequence: TTT
  source 1..20: mol_type = other DNA
ttttgagagagatctcactc

SEQ ID NO: 34453 - DNA, 20 bp, synthetic construct
  misc_feature 1..20: note = Description of Artificial Sequence: Synthetic oligonucleotide
  misc_feature 1..20: note = Target: FXN; (+) strand; PAM type: YTN; PAM sequence: TTT
  source 1..20: mol_type = other DNA
tttgagagagatctcactct

SEQ ID NO: 34454 - DNA, 20 bp, synthetic construct
  misc_feature 1..20: note = Description of Artificial Sequence: Synthetic oligonucleotide
  misc_feature 1..20: note = Target: FXN; (+) strand; PAM type: YTN; PAM sequence: TTT
  source 1..20: mol_type = other DNA
ttgagagagatctcactctg

SEQ ID NO: 34455 - DNA, 20 bp, synthetic construct
  misc_feature 1..20: note = Description of Artificial Sequence: Synthetic oligonucleotide
  misc_feature 1..20: note = Target: FXN; (+) strand; PAM type: YTN; PAM sequence: TTT
  source 1..20: mol_type = other DNA
tgagagagatctcactctgt

SEQ ID NO: 34456 - DNA, 20 bp, synthetic construct
  misc_feature 1..20: note = Description of Artificial Sequence: Synthetic oligonucleotide
  misc_feature 1..20: note = Target: FXN; (+) strand; PAM type: YTN; PAM sequence: TTT
  source 1..20: mol_type = other DNA
gagagagatctcactctgtc

SEQ ID NO: 34457 - DNA, 20 bp, synthetic construct
  misc_feature 1..20: note = Description of Artificial Sequence: Synthetic oligonucleotide
  misc_feature 1..20: note = Target: FXN; (+) strand; PAM type: YTN; PAM sequence: TTG
  source 1..20: mol_type = other DNA
agagagatctcactctgtca

SEQ ID NO: 34458 - DNA, 20 bp, synthetic construct
  misc_feature 1..20: note = Description of Artificial Sequence: Synthetic oligonucleotide
  misc_feature 1..20: note = Target: FXN; (+) strand; PAM type: YTN; PAM sequence: CTC
  source 1..20: mol_type = other DNA
actctgtcacccaggctgga

SEQ ID NO: 34459 - DNA, 20 bp, synthetic construct
  misc_feature 1..20: note = Description of Artificial Sequence: Synthetic oligonucleotide
  misc_feature 1..20: note = Target: FXN; (+) strand; PAM type: YTN; PAM sequence: CTC
  source 1..20: mol_type = other DNA
tgtcacccaggctggagtgc

SEQ ID NO: 34460 - DNA, 20 bp, synthetic construct
  misc_feature 1..20: note = Description of Artificial Sequence: Synthetic oligonucleotide
  misc_feature 1..20: note = Target: FXN; (+) strand; PAM type: YTN; PAM sequence: CTG
  source 1..20: mol_type = other DNA
tcacccaggctggagtgcag

SEQ ID NO: 34461 - DNA, 20 bp, synthetic construct
  misc_feature 1..20: note = Description of Artificial Sequence: Synthetic oligonucleotide
  misc_feature 1..20: note = Target: FXN; (+) strand; PAM type: YTN; PAM sequence: CTG
  source 1..20: mol_type = other DNA
gagtgcagtggcacgatctc

SEQ ID NO: 34462 - DNA, 20 bp, synthetic construct
  misc_feature 1..20: note = Description of Artificial Sequence: Synthetic oligonucleotide
  misc_feature 1..20: note = Target: FXN; (+) strand; PAM type: YTN; PAM sequence: CTC
  source 1..20: mol_type = other DNA
agctcactgcaaccaccacc

SEQ ID NO: 34463 - DNA, 20 bp, synthetic construct
  misc_feature 1..20: note = Description of Artificial Sequence: Synthetic oligonucleotide
  misc_feature 1..20: note = Target: FXN; (+) strand; PAM type: YTN; PAM sequence: CTC
  source 1..20: mol_type = other DNA
actgcaaccaccacctcctg

SEQ ID NO: 34464 - DNA, 20 bp, synthetic construct
  misc_feature 1..20: note = Description of Artificial Sequence: Synthetic oligonucleotide
  misc_feature 1..20: note = Target: FXN; (+) strand; PAM type: YTN; PAM sequence: CTG
  source 1..20: mol_type = other DNA
caaccaccacctcctgggct

SEQ ID NO: 34465 - DNA, 20 bp, synthetic construct
  misc_feature 1..20: note = Description of Artificial Sequence: Synthetic oligonucleotide
  misc_feature 1..20: note = Target: FXN; (+) strand; PAM type: YTN; PAM sequence: CTC
  source 1..20: mol_type = other DNA
ctgggctcaagggattctct

SEQ ID NO: 34466 - DNA, 20 bp, synthetic construct
  misc_feature 1..20: note = Description of Artificial Sequence: Synthetic oligonucleotide
  misc_feature 1..20: note = Target: FXN; (+) strand; PAM type: YTN; PAM sequence: CTG
  source 1..20: mol_type = other DNA
ggctcaagggattctcttgc

SEQ ID NO: 34467 - DNA, 20 bp, synthetic construct
  misc_feature 1..20: note = Description of Artificial Sequence: Synthetic oligonucleotide
  misc_feature 1..20: note = Target: FXN; (+) strand; PAM type: YTN; PAM sequence: CTC
  source 1..20: mol_type = other DNA
aagggattctcttgcctcag

SEQ ID NO: 34468 - DNA, 20 bp, synthetic construct
  misc_feature 1..20: note = Description of Artificial Sequence: Synthetic oligonucleotide
  misc_feature 1..20: note = Target: FXN; (+) strand; PAM type: YTN; PAM sequence: TTC
  source 1..20: mol_type = other DNA
tcttgcctcagtctcccgag

SEQ ID NO: 34469 - DNA, 20 bp, synthetic construct
  misc_feature 1..20: note = Description of Artificial Sequence: Synthetic oligonucleotide
  misc_feature 1..20: note = Target: FXN; (+) strand; PAM type: YTN; PAM sequence: CTC
  source 1..20: mol_type = other DNA
ttgcctcagtctcccgagta

SEQ ID NO: 34470 - DNA, 20 bp, synthetic construct
  misc_feature 1..20: note = Description of Artificial Sequence: Synthetic oligonucleotide
  misc_feature 1..20: note = Target: FXN; (+) strand; PAM type: YTN; PAM sequence: CTT
  source 1..20: mol_type = other DNA
gcctcagtctcccgagtaac

SEQ ID NO: 34471 - DNA, 20 bp, synthetic construct
  misc_feature 1..20: note = Description of Artificial Sequence: Synthetic oligonucleotide
  misc_feature 1..20: note = Target: FXN; (+) strand; PAM type: YTN; PAM sequence: TTG
  source 1..20: mol_type = other DNA
cctcagtctcccgagtaact

SEQ ID NO: 34472 - DNA, 20 bp, synthetic construct
  misc_feature 1..20: note = Description of Artificial Sequence: Synthetic oligonucleotide
  misc_feature 1..20: note = Target: FXN; (+) strand; PAM type: YTN; PAM sequence: CTC
  source 1..20: mol_type = other DNA
agtctcccgagtaactggga

SEQ ID NO: 34473 - DNA, 20 bp, synthetic construct
  misc_feature 1..20: note = Description of Artificial Sequence: Synthetic oligonucleotide
  misc_feature 1..20: note = Target: FXN; (+) strand; PAM type: YTN; PAM sequence: CTC
  source 1..20: mol_type = other DNA
ccgagtaactgggattacag

SEQ ID NO: 34474 - DNA, 20 bp, synthetic construct
  misc_feature 1..20: note = Description of Artificial Sequence: Synthetic oligonucleotide
  misc_feature 1..20: note = Target: FXN; (+) strand; PAM type: YTN; PAM sequence: CTG
  source 1..20: mol_type = other DNA
ggattacaggcgcgtgccac

SEQ ID NO: 34475 - DNA, 20 bp, synthetic construct
  misc_feature 1..20: note = Description of Artificial Sequence: Synthetic oligonucleotide
  misc_feature 1..20: note = Target: FXN; (+) strand; PAM type: YTN; PAM sequence: TTA
  source 1..20: mol_type = other DNA
caggcgcgtgccactatgtc

SEQ ID NO: 34476 - DNA, 20 bp, synthetic construct
  misc_feature 1..20: note = Description of Artificial Sequence: Synthetic oligonucleotide
  misc_feature 1..20: note = Target: FXN; (+) strand; PAM type: YTN; PAM sequence: CTA
  source 1..20: mol_type = other DNA
tgtccagctaattttttttt

SEQ ID NO: 34477 - DNA, 20 bp, synthetic construct
  misc_feature 1..20: note = Description of Artificial Sequence: Synthetic oligonucleotide
  misc_feature 1..20: note = Target: FXN; (+) strand; PAM type: YTN; PAM sequence: CTA
  source 1..20: mol_type = other DNA
atttttttttttgtattttt

SEQ ID NO: 34478 - DNA, 20 bp, synthetic construct
  misc_feature 1..20: note = Description of Artificial Sequence: Synthetic oligonucleotide
  misc_feature 1..20: note = Target: FXN; (+) strand; PAM type: YTN; PAM sequence: TTT
  source 1..20: mol_type = other DNA
ttttttttgtatttttagta

SEQ ID NO: 34479 - DNA, 20 bp, synthetic construct
  misc_feature 1..20: note = Description of Artificial Sequence: Synthetic oligonucleotide
  misc_feature 1..20: note = Target: FXN; (+) strand; PAM type: YTN; PAM sequence: TTT
  source 1..20: mol_type = other DNA
tttttttgtatttttagtag

SEQ ID NO: 34480 - DNA, 20 bp, synthetic construct
  misc_feature 1..20: note = Description of Artificial Sequence: Synthetic oligonucleotide
  misc_feature 1..20: note = Target: FXN; (+) strand; PAM type: YTN; PAM sequence: TTT
  source 1..20: mol_type = other DNA
ttttttgtatttttagtaga

SEQ ID NO: 34481 - DNA, 20 bp, synthetic construct
  misc_feature 1..20: note = Description of Artificial Sequence: Synthetic oligonucleotide
  misc_feature 1..20: note = Target: FXN; (+) strand; PAM type: YTN; PAM sequence: TTT
  source 1..20: mol_type = other DNA
tttttgtatttttagtagag

SEQ ID NO: 34482 - DNA, 20 bp, synthetic construct
  misc_feature 1..20: note = Description of Artificial Sequence: Synthetic oligonucleotide
  misc_feature 1..20: note = Target: FXN; (+) strand; PAM type: YTN; PAM sequence: TTT
  source 1..20: mol_type = other DNA
ttttgtatttttagtagaga

SEQ ID NO: 34483 - DNA, 20 bp, synthetic construct
  misc_feature 1..20: note = Description of Artificial Sequence: Synthetic oligonucleotide
  misc_feature 1..20: note = Target: FXN; (+) strand; PAM type: YTN; PAM sequence: TTT
  source 1..20: mol_type = other DNA
tttgtatttttagtagagat

SEQ ID NO: 34484 - DNA, 20 bp, synthetic construct
  misc_feature 1..20: note = Description of Artificial Sequence: Synthetic oligonucleotide
  misc_feature 1..20: note = Target: FXN; (+) strand; PAM type: YTN; PAM sequence: TTT
  source 1..20: mol_type = other DNA
ttgtatttttagtagagatg

SEQ ID NO: 34485 - DNA, 20 bp, synthetic construct
  misc_feature 1..20: note = Description of Artificial Sequence: Synthetic oligonucleotide
  misc_feature 1..20: note = Target: FXN; (+) strand; PAM type: YTN; PAM sequence: TTT
  source 1..20: mol_type = other DNA
tgtatttttagtagagatgg

SEQ ID NO: 34486 - DNA, 20 bp, synthetic construct
  misc_feature 1..20: note = Description of Artificial Sequence: Synthetic oligonucleotide
  misc_feature 1..20: note = Target: FXN; (+) strand; PAM type: YTN; PAM sequence: TTT
  source 1..20: mol_type = other DNA
gtatttttagtagagatggg

SEQ ID NO: 34487 - DNA, 20 bp, synthetic construct
  misc_feature 1..20: note = Description of Artificial Sequence: Synthetic oligonucleotide
  misc_feature 1..20: note = Target: FXN; (+) strand; PAM type: YTN; PAM sequence: TTG
  source 1..20: mol_type = other DNA
tatttttagtagagatgggg

SEQ ID NO: 34488 - DNA, 20 bp, synthetic construct
  misc_feature 1..20: note = Description of Artificial Sequence: Synthetic oligonucleotide
  misc_feature 1..20: note = Target: FXN; (+) strand; PAM type: YTN; PAM sequence: TTT
  source 1..20: mol_type = other DNA
ttagtagagatggggtttca

SEQ ID NO: 34489 - DNA, 20 bp, synthetic construct
  misc_feature 1..20: note = Description of Artificial Sequence: Synthetic oligonucleotide
  misc_feature 1..20: note = Target: FXN; (+) strand; PAM type: YTN; PAM sequence: TTT
  source 1..20: mol_type = other DNA
tagtagagatggggtttcac

SEQ ID NO: 34490 - DNA, 20 bp, synthetic construct
  misc_feature 1..20: note = Description of Artificial Sequence: Synthetic oligonucleotide
  misc_feature 1..20: note = Target: FXN; (+) strand; PAM type: YTN; PAM sequence: TTT
  source 1..20: mol_type = other DNA
agtagagatggggtttcacc

SEQ ID NO: 34491 - DNA, 20 bp, synthetic construct
  misc_feature 1..20: note = Description of Artificial Sequence: Synthetic oligonucleotide
  misc_feature 1..20: note = Target: FXN; (+) strand; PAM type: YTN; PAM sequence: TTA
  source 1..20: mol_type = other DNA
gtagagatggggtttcacca

SEQ ID NO: 34492 - DNA, 20 bp, synthetic construct
  misc_feature 1..20: note = Description of Artificial Sequence: Synthetic oligonucleotide
  misc_feature 1..20: note = Target: FXN; (+) strand; PAM type: YTN; PAM sequence: TTT
  source 1..20: mol_type = other DNA
caccatgttggcctggctgg

SEQ ID NO: 34493 - DNA, 20 bp, synthetic construct
  misc_feature 1..20: note = Description of Artificial Sequence: Synthetic oligonucleotide
  misc_feature 1..20: note = Target: FXN; (+) strand; PAM type: YTN; PAM sequence: TTC
  source 1..20: mol_type = other DNA
accatgttggcctggctggt

SEQ ID NO: 34494 - DNA, 20 bp, synthetic construct
  misc_feature 1..20: note = Description of Artificial Sequence: Synthetic oligonucleotide
  misc_feature 1..20: note = Target: FXN; (+) strand; PAM type: YTN; PAM sequence: TTG
  source 1..20: mol_type = other DNA
gcctggctggtcttgaactc

SEQ ID NO: 34495 - DNA, 20 bp, synthetic construct
  misc_feature 1..20: note = Description of Artificial Sequence: Synthetic oligonucleotide
  misc_feature 1..20: note = Target: FXN; (+) strand; PAM type: YTN; PAM sequence: CTG
  source 1..20: mol_type = other DNA
gctggtcttgaactcttgac

SEQ ID NO: 34496 - DNA, 20 bp, synthetic construct
  misc_feature 1..20: note = Description of Artificial Sequence: Synthetic oligonucleotide
  misc_feature 1..20: note = Target: FXN; (+) strand; PAM type: YTN; PAM sequence: CTG
  source 1..20: mol_type = other DNA
gtcttgaactcttgacctca

SEQ ID NO: 34497 - DNA, 20 bp, synthetic construct
  misc_feature 1..20: note = Description of Artificial Sequence: Synthetic oligonucleotide
  misc_feature 1..20: note = Target: FXN; (+) strand; PAM type: YTN; PAM sequence: CTT
  source 1..20: mol_type = other DNA
gaactcttgacctcaagtga

SEQ ID NO: 34498 - DNA, 20 bp, synthetic construct
  misc_feature 1..20: note = Description of Artificial Sequence: Synthetic oligonucleotide
  misc_feature 1..20: note = Target: FXN; (+) strand; PAM type: YTN; PAM sequence: TTG
  source 1..20: mol_type = other DNA
aactcttgacctcaagtgat

SEQ ID NO: 34499 - DNA, 20 bp, synthetic construct
  misc_feature 1..20: note = Description of Artificial Sequence: Synthetic oligonucleotide
  misc_feature 1..20: note = Target: FXN; (+) strand; PAM type: YTN; PAM sequence: CTC
  source 1..20: mol_type = other DNA
ttgacctcaagtgatccact

SEQ ID NO: 34500 - DNA, 20 bp, synthetic construct
  misc_feature 1..20: note = Description of Artificial Sequence: Synthetic oligonucleotide
  misc_feature 1..20: note = Target: FXN; (+) strand; PAM type: YTN; PAM sequence: CTT
  source 1..20: mol_type = other DNA
gacctcaagtgatccactgg

SEQ ID NO: 34501 - DNA, 20 bp, synthetic construct
  misc_feature 1..20: note = Description of Artificial Sequence: Synthetic oligonucleotide
  misc_feature 1..20: note = Target: FXN; (+) strand; PAM type: YTN; PAM sequence: TTG
  source 1..20: mol_type = other DNA
acctcaagtgatccactggc

SEQ ID NO: 34502 - DNA, 20 bp, synthetic construct
  misc_feature 1..20: note = Description of Artificial Sequence: Synthetic oligonucleotide
  misc_feature 1..20: note = Target: FXN; (+) strand; PAM type: YTN; PAM sequence: CTC
  source 1..20: mol_type = other DNA
aagtgatccactggcctcag

SEQ ID NO: 34503 - DNA, 20 bp, synthetic construct
  misc_feature 1..20: note = Description of Artificial Sequence: Synthetic oligonucleotide
  misc_feature 1..20: note = Target: FXN; (+) strand; PAM type: YTN; PAM sequence: CTG
  source 1..20: mol_type = other DNA
gcctcagcctcccaaagtgc

SEQ ID NO: 34504 - DNA, 20 bp, synthetic construct
  misc_feature 1..20: note = Description of Artificial Sequence: Synthetic oligonucleotide
  misc_feature 1..20: note = Target: FXN; (+) strand; PAM type: YTN; PAM sequence: CTC
  source 1..20: mol_type = other DNA
agcctcccaaagtgctggca

SEQ ID NO: 34505 - DNA, 20 bp, synthetic construct
  misc_feature 1..20: note = Description of Artificial Sequence: Synthetic oligonucleotide
  misc_feature 1..20: note = Target: FXN; (+) strand; PAM type: YTN; PAM sequence: CTC
  source 1..20: mol_type = other DNA
ccaaagtgctggcattagag

SEQ ID NO: 34506 - DNA, 20 bp, synthetic construct
  misc_feature 1..20: note = Description of Artificial Sequence: Synthetic oligonucleotide
  misc_feature 1..20: note = Target: FXN; (+) strand; PAM type: YTN; PAM sequence: CTG
  source 1..20: mol_type = other DNA
gcattagaggtgtgagtcac

SEQ ID NO: 34507 - DNA, 20 bp, synthetic construct
  misc_feature 1..20: note = Description of Artificial Sequence: Synthetic oligonucleotide
  misc_feature 1..20: note = Target: FXN; (+) strand; PAM type: YTN; PAM sequence: TTA
  source 1..20: mol_type = other DNA
gaggtgtgagtcactgttcc

SEQ ID NO: 34508 - DNA, 20 bp, synthetic construct
  misc_feature 1..20: note = Description of Artificial Sequence: Synthetic oligonucleotide
  misc_feature 1..20: note = Target: FXN; (+) strand; PAM type: YTN; PAM sequence: CTG
  source 1..20: mol_type = other DNA
ttcctggcccagtgaggcac

SEQ ID NO: 34509 - DNA, 20 bp, synthetic construct
  misc_feature 1..20: note = Description of Artificial Sequence: Synthetic oligonucleotide
  misc_feature 1..20: note = Target: FXN; (+) strand; PAM type: YTN; PAM sequence: TTC
  source 1..20: mol_type = other DNA
ctggcccagtgaggcaccat

SEQ ID NO: 34510 - DNA, 20 bp, synthetic construct
  misc_feature 1..20: note = Description of Artificial Sequence: Synthetic oligonucleotide
  misc_feature 1..20: note = Target: FXN; (+) strand; PAM type: YTN; PAM sequence: CTG
  source 1..20: mol_type = other DNA
gcccagtgaggcaccatctc

SEQ ID NO: 34511 - DNA, 20 bp, synthetic construct
  misc_feature 1..20: note = Description of Artificial Sequence: Synthetic oligonucleotide
  misc_feature 1..20: note = Target: FXN; (+) strand; PAM type: YTN; PAM sequence: CTC
  source 1..20: mol_type = other DNA
attggatatggagacaaagg

SEQ ID NO: 34512 - DNA, 20 bp, synthetic construct
  misc_feature 1..20: note = Description of Artificial Sequence: Synthetic oligonucleotide
  misc_feature 1..20: note = Target: FXN; (+) strand; PAM type: YTN; PAM sequence: TTG
  source 1..20: mol_type = other DNA
gatatggagacaaaggatct

SEQ ID NO: 34513 - DNA, 20 bp, synthetic construct
  misc_feature 1..20: note = Description of Artificial Sequence: Synthetic oligonucleotide
  misc_feature 1..20: note = Target: FXN; (+) strand; PAM type: YTN; PAM sequence: CTG
  source 1..20: mol_type = other DNA
gcttagcatcctggatttgt

SEQ ID NO: 34514 - DNA, 20 bp, synthetic construct
  misc_feature 1..20: note = Description of Artificial Sequence: Synthetic oligonucleotide
  misc_feature 1..20: note = Target: FXN; (+) strand; PAM type: YTN; PAM sequence: CTT
  source 1..20: mol_type = other DNA
agcatcctggatttgtattt

SEQ ID NO: 34515 - DNA, 20 bp, synthetic construct
  misc_feature 1..20: note = Description of Artificial Sequence: Synthetic oligonucleotide
  misc_feature 1..20: note = Target: FXN; (+) strand; PAM type: YTN; PAM sequence: TTA
  source 1..20: mol_type = other DNA
gcatcctggatttgtatttt

SEQ ID NO: 34516 - DNA, 20 bp, synthetic construct
  misc_feature 1..20: note = Description of Artificial Sequence: Synthetic oligonucleotide
  misc_feature 1..20: note = Target: FXN; (+) strand; PAM type: YTN; PAM sequence: CTG
  source 1..20: mol_type = other DNA
gatttgtattttctttccaa

SEQ ID NO: 34517 - DNA, 20 bp, synthetic construct
  misc_feature 1..20: note = Description of Artificial Sequence: Synthetic oligonucleotide
  misc_feature 1..20: note = Target: FXN; (+) strand; PAM type: YTN; PAM sequence: TTT
  source 1..20: mol_type = other DNA
gtattttctttccaagagtc

SEQ ID NO: 34518 - DNA, 20 bp, synthetic construct
  misc_feature 1..20: note = Description of Artificial Sequence: Synthetic oligonucleotide
  misc_feature 1..20: note = Target: FXN; (+) strand; PAM type: YTN; PAM sequence: TTG
  source 1..20: mol_type = other DNA
tattttctttccaagagtcc

SEQ ID NO: 34519 - DNA, 20 bp, synthetic construct
  misc_feature 1..20: note = Description of Artificial Sequence: Synthetic oligonucleotide
  misc_feature 1..20: note = Target: FXN; (+) strand; PAM type: YTN; PAM sequence: TTT
  source 1..20: mol_type = other DNA
tctttccaagagtccttaag

SEQ ID NO: 34520 - DNA, 20 bp, synthetic construct
  misc_feature 1..20: note = Description of Artificial Sequence: Synthetic oligonucleotide
  misc_feature 1..20: note = Target: FXN; (+) strand; PAM type: YTN; PAM sequence: TTT
  source 1..20: mol_type = other DNA
ctttccaagagtccttaagt

SEQ ID NO: 34521 - DNA, 20 bp, synthetic construct
  misc_feature 1..20: note = Description of Artificial Sequence: Synthetic oligonucleotide
  misc_feature 1..20: note = Target: FXN; (+) strand; PAM type: YTN; PAM sequence: TTC
  source 1..20: mol_type = other DNA
tttccaagagtccttaagtg

SEQ ID NO: 34522 - DNA, 20 bp, synthetic construct
  misc_feature 1..20: note = Description of Artificial Sequence: Synthetic oligonucleotide
  misc_feature 1..20: note = Target: FXN; (+) strand; PAM type: YTN; PAM sequence: CTT
  source 1..20: mol_type = other DNA
tccaagagtccttaagtgat

SEQ ID NO: 34523 - DNA, 20 bp, synthetic construct
  misc_feature 1..20: note = Description of Artificial Sequence: Synthetic oligonucleotide
  misc_feature 1..20: note = Target: FXN; (+) strand; PAM type: YTN; PAM sequence: TTT
  source 1..20: mol_type = other DNA
ccaagagtccttaagtgata

SEQ ID NO: 34524 - DNA, 20 bp, synthetic construct
  misc_feature 1..20: note = Description of Artificial Sequence: Synthetic oligonucleotide
  misc_feature 1..20: note = Target: FXN; (+) strand; PAM type: YTN; PAM sequence: TTC
  source 1..20: mol_type = other DNA
caagagtccttaagtgatat

SEQ ID NO: 34525 - DNA, 20 bp, synthetic construct
  misc_feature 1..20: note = Description of Artificial Sequence: Synthetic oligonucleotide
  misc_feature 1..20: note = Target: FXN; (+) strand; PAM type: YTN; PAM sequence: CTT
  source 1..20: mol_type = other DNA
aagtgatatctaacttttgc

SEQ ID NO: 34526 - DNA, 20 bp, synthetic construct
  misc_feature 1..20: note = Description of Artificial Sequence: Synthetic oligonucleotide
  misc_feature 1..20: note = Target: FXN; (+) strand; PAM type: YTN; PAM sequence: TTA
  source 1..20: mol_type = other DNA
agtgatatctaacttttgcg

SEQ ID NO: 34527 - DNA, 20 bp, synthetic construct
  misc_feature 1..20: note = Description of Artificial Sequence: Synthetic oligonucleotide
  misc_feature 1..20: note = Target: FXN; (+) strand; PAM type: YTN; PAM sequence: CTA
  source 1..20: mol_type = other DNA
acttttgcgagctgcagttt

SEQ ID NO: 34528 - DNA, 20 bp, synthetic construct
  misc_feature 1..20: note = Description of Artificial Sequence: Synthetic oligonucleotide
  misc_feature 1..20: note = Target: FXN; (+) strand; PAM type: YTN; PAM sequence: CTT
  source 1..20: mol_type = other DNA
ttgcgagctgcagtttcctc

SEQ ID NO: 34529 - DNA, 20 bp, synthetic construct
  misc_feature 1..20: note = Description of Artificial Sequence: Synthetic oligonucleotide
  misc_feature 1..20: note = Target: FXN; (+) strand; PAM type: YTN; PAM sequence: TTT
  source 1..20: mol_type = other DNA
tgcgagctgcagtttcctca

SEQ ID NO: 34530 - DNA, 20 bp, synthetic construct
  misc_feature 1..20: note = Description of Artificial Sequence: Synthetic oligonucleotide
  misc_feature 1..20: note = Target: FXN; (+) strand; PAM type: YTN; PAM sequence: TTT
  source 1..20: mol_type = other DNA
gcgagctgcagtttcctcag

SEQ ID NO: 34531 - DNA, 20 bp, synthetic construct
  misc_feature 1..20: note = Description of Artificial Sequence: Synthetic oligonucleotide
  misc_feature 1..20: note = Target: FXN; (+) strand; PAM type: YTN; PAM sequence: TTG
  source 1..20: mol_type = other DNA
cgagctgcagtttcctcagc

SEQ ID NO: 34532 - DNA, 20 bp, synthetic construct
  misc_feature 1..20: note = Description of Artificial Sequence: Synthetic oligonucleotide
  misc_feature 1..20: note = Target: FXN; (+) strand; PAM type: YTN; PAM sequence: CTG
  source 1..20: mol_type = other DNA
cagtttcctcagctatgaga

SEQ ID NO: 34533 - DNA, 20 bp, synthetic construct
  misc_feature 1..20: note = Description of Artificial Sequence: Synthetic oligonucleotide
  misc_feature 1..20: note = Target: FXN; (+) strand; PAM type: YTN; PAM sequence: TTT
  source 1..20: mol_type = other DNA
cctcagctatgagatgagtg

SEQ ID NO: 34534 - DNA, 20 bp, synthetic construct
  misc_feature 1..20: note = Description of Artificial Sequence: Synthetic oligonucleotide
  misc_feature 1..20: note = Target: FXN; (+) strand; PAM type: YTN; PAM sequence: TTC
  source 1..20: mol_type = other DNA
ctcagctatgagatgagtga

SEQ ID NO: 34535 - DNA, 20 bp, synthetic construct
  misc_feature 1..20: note = Description of Artificial Sequence: Synthetic oligonucleotide
  misc_feature 1..20: note = Target: FXN; (+) strand; PAM type: YTN; PAM sequence: CTC
  source 1..20: mol_type = other DNA
agctatgagatgagtgacat

SEQ ID NO: 34536 - DNA, 20 bp, synthetic construct
  misc_feature 1..20: note = Description of Artificial Sequence: Synthetic oligonucleotide
  misc_feature 1..20: note = Target: FXN; (+) strand; PAM type: YTN; PAM sequence: CTA
  source 1..20: mol_type = other DNA
tgagatgagtgacattaacc

SEQ ID NO: 34537 - DNA, 20 bp, synthetic construct
  misc_feature 1..20: note = Description of Artificial Sequence: Synthetic oligonucleotide
  misc_feature 1..20: note = Target: FXN; (+) strand; PAM type: YTN; PAM sequence: TTA
  source 1..20: mol_type = other DNA
acctcctctcttcagattta

SEQ ID NO: 34538 - DNA, 20 bp, synthetic construct
  misc_feature 1..20: note = Description of Artificial Sequence: Synthetic oligonucleotide
  misc_feature 1..20: note = Target: FXN; (+) strand; PAM type: YTN; PAM sequence: CTC
  source 1..20: mol_type = other DNA
ctctcttcagatttataaga

SEQ ID NO: 34539 - DNA, 20 bp, synthetic construct
  misc_feature 1..20: note = Description of Artificial Sequence: Synthetic oligonucleotide
  misc_feature 1..20: note = Target: FXN; (+) strand; PAM type: YTN; PAM sequence: CTC
  source 1..20: mol_type = other DNA
tcttcagatttataagagga

SEQ ID NO: 34540 - DNA, 20 bp, synthetic construct
  misc_feature 1..20: note = Description of Artificial Sequence: Synthetic oligonucleotide
  misc_feature 1..20: note = Target: FXN; (+) strand; PAM type: YTN; PAM sequence: CTC
  source 1..20: mol_type = other DNA
ttcagatttataagaggatc

SEQ ID NO: 34541 - DNA, 20 bp, synthetic construct
  misc_feature 1..20: note = Description of Artificial Sequence: Synthetic oligonucleotide
  misc_feature 1..20: note = Target: FXN; (+) strand; PAM type: YTN; PAM sequence: CTT
  source 1..20: mol_type = other DNA
cagatttataagaggatcaa

SEQ ID NO: 34542 - DNA, 20 bp, synthetic construct
  misc_feature 1..20: note = Description of Artificial Sequence: Synthetic oligonucleotide
  misc_feature 1..20: note = Target: FXN; (+) strand; PAM type: YTN; PAM sequence: TTC
  source 1..20: mol_type = other DNA
agatttataagaggatcaat

SEQ ID NO: 34543 - DNA, 20 bp, synthetic construct
  misc_feature 1..20: note = Description of Artificial Sequence: Synthetic oligonucleotide
  misc_feature 1..20: note = Target: FXN; (+) strand; PAM type: YTN; PAM sequence: TTT
  source 1..20: mol_type = other DNA
ataagaggatcaattaaaat

SEQ ID NO: 34544 - DNA, 20 bp, synthetic construct
  misc_feature 1..20: note = Description of Artificial Sequence: Synthetic oligonucleotide
  misc_feature 1..20: note = Target: FXN; (+) strand; PAM type: YTN; PAM sequence: TTA
  source 1..20: mol_type = other DNA
taagaggatcaattaaaatg

SEQ ID NO: 34545 - DNA, 20 bp, synthetic construct
  misc_feature 1..20: note = Description of Artificial Sequence: Synthetic oligonucleotide
  misc_feature 1..20: note = Target: FXN; (+) strand; PAM type: YTN; PAM sequence: TTA
  source 1..20: mol_type = other DNA
aaatggcataggtaaaagtg

SEQ ID NO: 34546 - DNA, 20 bp, synthetic construct
  misc_feature 1..20: note = Description of Artificial Sequence: Synthetic oligonucleotide
  misc_feature 1..20: note = Target: FXN; (+) strand; PAM type: YTN; PAM sequence: CTA
  source 1..20: mol_type = other DNA
gcaagttggtatctacttta

SEQ ID NO: 34547 - DNA, 20 bp, synthetic construct
  misc_feature 1..20: note = Description of Artificial Sequence: Synthetic oligonucleotide
  misc_feature 1..20: note = Target: FXN; (+) strand; PAM type: YTN; PAM sequence: TTG
  source 1..20: mol_type = other DNA
gtatctactttagaaatgaa

SEQ ID NO: 34548 - DNA, 20 bp, synthetic construct
  misc_feature 1..20: note = Description of Artificial Sequence: Synthetic oligonucleotide
  misc_feature 1..20: note = Target: FXN; (+) strand; PAM type: YTN; PAM sequence: CTA
  source 1..20: mol_type = other DNA
ctttagaaatgaaggaggtc

SEQ ID NO: 34549 - DNA, 20 bp, synthetic construct
  misc_feature 1..20: note = Description of Artificial Sequence: Synthetic oligonucleotide
  misc_feature 1..20: note = Target: FXN; (+) strand; PAM type: YTN; PAM sequence: CTT
  source 1..20: mol_type = other DNA
tagaaatgaaggaggtcata

SEQ ID NO: 34550 - DNA, 20 bp, synthetic construct
  misc_feature 1..20: note = Description of Artificial Sequence: Synthetic oligonucleotide
  misc_feature 1..20: note = Target: FXN; (+) strand; PAM type: YTN; PAM sequence: TTT
  source 1..20: mol_type = other DNA
agaaatgaaggaggtcatat

SEQ ID NO: 34551 - DNA, 20 bp, synthetic construct
  misc_feature 1..20: note = Description of Artificial Sequence: Synthetic oligonucleotide
  misc_feature 1..20: note = Target: FXN; (+) strand; PAM type: YTN; PAM sequence: TTA
  source 1..20: mol_type = other DNA
gaaatgaaggaggtcatatg

SEQ ID NO: 34552 - DNA, 20 bp, synthetic construct
  misc_feature 1..20: note = Description of Artificial Sequence: Synthetic oligonucleotide
  misc_feature 1..20: note = Target: FXN; (+) strand; PAM type: YTN; PAM sequence: CTC
  source 1..20: mol_type = other DNA
cagacccaacatgccatctt

SEQ ID NO: 34553 - DNA, 20 bp, synthetic construct
  misc_feature 1..20: note = Description of Artificial Sequence: Synthetic oligonucleotide
  misc_feature 1..20: note = Target: FXN; (+) strand; PAM type: YTN; PAM sequence: CTT
  source 1..20: mol_type = other DNA
atatgtgtctatttctacaa

SEQ ID NO: 34554 - DNA, 20 bp, synthetic construct
  misc_feature 1..20: note = Description of Artificial Sequence: Synthetic oligonucleotide
  misc_feature 1..20: note = Target: FXN; (+) strand; PAM type: YTN; PAM sequence: TTA
  source 1..20: mol_type = other DNA
tatgtgtctatttctacaag

SEQ ID NO: 34555 - DNA, 20 bp, synthetic construct
  misc_feature 1..20: note = Description of Artificial Sequence: Synthetic oligonucleotide
  misc_feature 1..20: note = Target: FXN; (+) strand; PAM type: YTN; PAM sequence: CTA
  source 1..20: mol_type = other DNA
tttctacaagtgagctagtg

SEQ ID NO: 34556 - DNA, 20 bp, synthetic construct
  misc_feature 1..20: note = Description of Artificial Sequence: Synthetic oligonucleotide
  misc_feature 1..20: note = Target: FXN; (+) strand; PAM type: YTN; PAM sequence: TTT
  source 1..20: mol_type = other DNA
ctacaagtgagctagtgaca

SEQ ID NO: 34557 - DNA, 20 bp, synthetic construct
  misc_feature 1..20: note = Description of Artificial Sequence: Synthetic oligonucleotide
  misc_feature 1..20: note = Target: FXN; (+) strand; PAM type: YTN; PAM sequence: TTC
  source 1..20: mol_type = other DNA
tacaagtgagctagtgacaa

SEQ ID NO: 34558 - DNA, 20 bp, synthetic construct
  misc_feature 1..20: note = Description of Artificial Sequence: Synthetic oligonucleotide
  misc_feature 1..20: note = Target: FXN; (+) strand; PAM type: YTN; PAM sequence: CTA
  source 1..20: mol_type = other DNA
caagtgagctagtgacaaca

SEQ ID NO: 34559 - DNA, 20 bp, synthetic construct
  misc_feature 1..20: note = Description of Artificial Sequence: Synthetic oligonucleotide
  misc_feature 1..20: note = Target: FXN; (+) strand; PAM type: YTN; PAM sequence: CTA
  source 1..20: mol_type = other DNA
gtgacaacagtaattgctat

SEQ ID NO: 34560 - DNA, 20 bp, synthetic construct
  misc_feature 1..20: note = Description of Artificial Sequence: Synthetic oligonucleotide
  misc_feature 1..20: note = Target: FXN; (+) strand; PAM type: YTN; PAM sequence: TTG
  source 1..20: mol_type = other DNA
ctatttttgctcctacatgg

SEQ ID NO: 34561 - DNA, 20 bp, synthetic construct
  misc_feature 1..20: note = Description of Artificial Sequence: Synthetic oligonucleotide
  misc_feature 1..20: note = Target: FXN; (+) strand; PAM type: YTN; PAM sequence: CTA
  source 1..20: mol_type = other DNA
tttttgctcctacatgggta

SEQ ID NO: 34562 - DNA, 20 bp, synthetic construct
  misc_feature 1..20: note = Description of Artificial Sequence: Synthetic oligonucleotide
  misc_feature 1..20: note = Target: FXN; (+) strand; PAM type: YTN; PAM sequence: TTT
  source 1..20: mol_type = other DNA
ttgctcctacatgggtaggg

SEQ ID NO: 34563 - DNA, 20 bp, synthetic construct
  misc_feature 1..20: note = Description of Artificial Sequence: Synthetic oligonucleotide
  misc_feature 1..20: note = Target: FXN; (+) strand; PAM type: YTN; PAM sequence: TTT
  source 1..20: mol_type = other DNA
tgctcctacatgggtagggc

SEQ ID NO: 34564 - DNA, 20 bp, synthetic construct
  misc_feature 1..20: note = Description of Artificial Sequence: Synthetic oligonucleotide
  misc_feature 1..20: note = Target: FXN; (+) strand; PAM type: YTN; PAM sequence: TTT
  source 1..20: mol_type = other DNA
gctcctacatgggtagggct

SEQ ID NO: 34565 - DNA, 20 bp, synthetic construct
  misc_feature 1..20: note = Description of Artificial Sequence: Synthetic oligonucleotide
  misc_feature 1..20: note = Target: FXN; (+) strand; PAM type: YTN; PAM sequence: TTG
  source 1..20: mol_type = other DNA
ctcctacatgggtagggctg

SEQ ID NO: 34566 - DNA, 20 bp, synthetic construct
  misc_feature 1..20: note = Description of Artificial Sequence: Synthetic oligonucleotide
  misc_feature 1..20: note = Target: FXN; (+) strand; PAM type: YTN; PAM sequence: CTC
  source 1..20: mol_type = other DNA
ctacatgggtagggctgatc

SEQ ID NO: 34567 - DNA, 20 bp, synthetic construct
  misc_feature 1..20: note = Description of Artificial Sequence: Synthetic oligonucleotide
  misc_feature 1..20: note = Target: FXN; (+) strand; PAM type: YTN; PAM sequence: CTA
  source 1..20: mol_type = other DNA
catgggtagggctgatcttg

SEQ ID NO: 34568 - DNA, 20 bp, synthetic construct
  misc_feature 1..20: note = Description of Artificial Sequence: Synthetic oligonucleotide
  misc_feature 1..20: note = Target: FXN; (+) strand; PAM type: YTN; PAM sequence: CTG
  source 1..20: mol_type = other DNA
atcttgactaggaggagtca

SEQ ID NO: 34569 - DNA, 20 bp, synthetic construct
  misc_feature 1..20: note = Description of Artificial Sequence: Synthetic oligonucleotide
  misc_feature 1..20: note = Target: FXN; (+) strand; PAM type: YTN; PAM sequence: CTT
  source 1..20: mol_type = other DNA
gactaggaggagtcaataag

SEQ ID NO: 34570 - DNA, 20 bp, synthetic construct
  misc_feature 1..20: note = Description of Artificial Sequence: Synthetic oligonucleotide
  misc_feature 1..20: note = Target: FXN; (+) strand; PAM type: YTN; PAM sequence: TTG
  source 1..20: mol_type = other DNA
actaggaggagtcaataaga

SEQ ID NO: 34571 - DNA, 20 bp, synthetic construct
  misc_feature 1..20: note = Description of Artificial Sequence: Synthetic oligonucleotide
  misc_feature 1..20: note = Target: FXN; (+) strand; PAM type: YTN; PAM sequence: CTA
  source 1..20: mol_type = other DNA
ggaggagtcaataagactca

SEQ ID NO: 34572 - DNA, 20 bp, synthetic construct
  misc_feature 1..20: note = Description of Artificial Sequence: Synthetic oligonucleotide
  misc_feature 1..20: note = Target: FXN; (+) strand; PAM type: YTN; PAM sequence: CTC
  source 1..20: mol_type = other DNA
accagccgggcgtggtggct

SEQ ID NO: 34573 - DNA, 20 bp, synthetic construct
  misc_feature 1..20: note = Description of Artificial Sequence: Synthetic oligonucleotide
  misc_feature 1..20: note = Target: FXN; (+) strand; PAM type: YTN; PAM sequence: CTC
  source 1..20: mol_type = other DNA
acgcctgtaatcccagcact

SEQ ID NO: 34574 - DNA, 20 bp, synthetic construct
  misc_feature 1..20: note = Description of Artificial Sequence: Synthetic oligonucleotide
  misc_feature 1..20: note = Target: FXN; (+) strand; PAM type: YTN; PAM sequence: CTG
  source 1..20: mol_type = other DNA
taatcccagcactttgggag

SEQ ID NO: 34575 - DNA, 20 bp, synthetic construct
  misc_feature 1..20: note = Description of Artificial Sequence: Synthetic oligonucleotide
  misc_feature 1..20: note = Target: FXN; (+) strand; PAM type: YTN; PAM sequence: CTT
  source 1..20: mol_type = other DNA
tgggaggccaaggcgggcgg

SEQ ID NO: 34576 - DNA, 20 bp, synthetic construct
  misc_feature 1..20: note = Description of Artificial Sequence: Synthetic oligonucleotide
  misc_feature 1..20: note = Target: FXN; (+) strand; PAM type: YTN; PAM sequence: TTT
  source 1..20: mol_type = other DNA
gggaggccaaggcgggcgga

SEQ ID NO: 34577 - DNA, 20 bp, synthetic construct
  misc_feature 1..20: note = Description of Artificial Sequence: Synthetic oligonucleotide
  misc_feature 1..20: note = Target: FXN; (+) strand; PAM type: YTN; PAM sequence: TTG
  source 1..20: mol_type = other DNA
ggaggccaaggcgggcggat

SEQ ID NO: 34578 - DNA, 20 bp, synthetic construct
  misc_feature 1..20: note = Description of Artificial Sequence: Synthetic oligonucleotide
  misc_feature 1..20: note = Target: FXN; (+) strand; PAM type: YTN; PAM sequence: TTC
  source 1..20: mol_type = other DNA
tggctaacacggtgaaaccc

SEQ ID NO: 34579 - DNA, 20 bp, synthetic construct
  misc_feature 1..20: note = Description of Artificial Sequence: Synthetic oligonucleotide
  misc_feature 1..20: note = Target: FXN; (+) strand; PAM type: YTN; PAM sequence: CTG
  source 1..20: mol_type = other DNA
gctaacacggtgaaaccccg

SEQ ID NO: 34580 - DNA, 20 bp, synthetic construct
  misc_feature 1..20: note = Description of Artificial Sequence: Synthetic oligonucleotide
  misc_feature 1..20: note = Target: FXN; (+) strand; PAM type: YTN; PAM sequence: CTA
  source 1..20: mol_type = other DNA
acacggtgaaaccccgtctc

SEQ ID NO: 34581 - DNA, 20 bp, synthetic construct
  misc_feature 1..20: note = Description of Artificial Sequence: Synthetic oligonucleotide
  misc_feature 1..20: note = Target: FXN; (+) strand; PAM type: YTN; PAM sequence: CTC
  source 1..20: mol_type = other DNA
tactaaaaaaatacaaaaaa

SEQ ID NO: 34582 - DNA, 20 bp, synthetic construct
  misc_feature 1..20: note = Description of Artificial Sequence: Synthetic oligonucleotide
  misc_feature 1..20: note = Target: FXN; (+) strand; PAM type: YTN; PAM sequence: CTA
  source 1..20: mol_type = other DNA
ctaaaaaaatacaaaaaaat

SEQ ID NO: 34583 - DNA, 20 bp, synthetic construct
  misc_feature 1..20: note = Description of Artificial Sequence: Synthetic oligonucleotide
  misc_feature 1..20: note = Target: FXN; (+) strand; PAM type: YTN; PAM sequence: CTA
  source 1..20: mol_type = other DNA
aaaaaatacaaaaaaattag

SEQ ID NO: 34584 - DNA, 20 bp, synthetic construct
  misc_feature 1..20: note = Description of Artificial Sequence: Synthetic oligonucleotide
  misc_feature 1..20: note = Target: FXN; (+) strand; PAM type: YTN; PAM sequence: TTA
  source 1..20: mol_type = other DNA
gctgggcgtggtggtgggcg

SEQ ID NO: 34585 - DNA, 20 bp, synthetic construct
  misc_feature 1..20: note = Description of Artificial Sequence: Synthetic oligonucleotide
  misc_feature 1..20: note = Target: FXN; (+) strand; PAM type: YTN; PAM sequence: CTG
  source 1..20: mol_type = other DNA
ggcgtggtggtgggcgcctg

SEQ ID NO: 34586 - DNA, 20 bp, synthetic construct
  misc_feature 1..20: note = Description of Artificial Sequence: Synthetic oligonucleotide
  misc_feature 1..20: note = Target: FXN; (+) strand; PAM type: YTN; PAM sequence: CTG
  source 1..20: mol_type = other DNA
tagtcccagctactcgggaa

SEQ ID NO: 34587 - DNA, 20 bp, synthetic construct
  misc_feature 1..20: note = Description of Artificial Sequence: Synthetic oligonucleotide
  misc_feature 1..20: note = Target: FXN; (+) strand; PAM type: YTN; PAM sequence: CTA
  source 1..20: mol_type = other DNA
ctcgggaagctgaggcagga

SEQ ID NO: 34588 - DNA, 20 bp, synthetic construct
  misc_feature 1..20: note = Description of Artificial Sequence: Synthetic oligonucleotide
  misc_feature 1..20: note = Target: FXN; (+) strand; PAM type: YTN; PAM sequence: CTC
  source 1..20: mol_type = other DNA
gggaagctgaggcaggagaa

SEQ ID NO: 34589 - DNA, 20 bp, synthetic construct
  misc_feature 1..20: note = Description of Artificial Sequence: Synthetic oligonucleotide
  misc_feature 1..20: note = Target: FXN; (+) strand; PAM type: YTN; PAM sequence: CTG
  source 1..20: mol_type = other DNA
aggcaggagaatggcgtgaa

SEQ ID NO: 34590 - DNA, 20 bp, synthetic construct
  misc_feature 1..20: note = Description of Artificial Sequence: Synthetic oligonucleotide
  misc_feature 1..20: note = Target: FXN; (+) strand; PAM type: YTN; PAM sequence: CTT
  source 1..20: mol_type = other DNA
gcagtgaaccaagatcgagc

SEQ ID NO: 34591 - DNA, 20 bp, synthetic construct
  misc_feature 1..20: note = Description of Artificial Sequence: Synthetic oligonucleotide
  misc_feature 1..20: note = Target: FXN; (+) strand; PAM type: YTN; PAM sequence: TTG
  source 1..20: mol_type = other DNA
cagtgaaccaagatcgagcc

SEQ ID NO: 34592 - DNA, 20 bp, synthetic construct
  misc_feature 1..20: note = Description of Artificial Sequence: Synthetic oligonucleotide
  misc_feature 1..20: note = Target: FXN; (+) strand; PAM type: YTN; PAM sequence: CTG
  source 1..20: mol_type = other DNA
cactctagcctgggtgacag

SEQ ID NO: 34593 - DNA, 20 bp, synthetic construct
  misc_feature 1..20: note = Description of Artificial Sequence: Synthetic oligonucleotide
  misc_feature 1..20: note = Target: FXN; (+) strand; PAM type: YTN; PAM sequence: CTC
  source 1..20: mol_type = other DNA
tagcctgggtgacagagcga

SEQ ID NO: 34594 - DNA, 20 bp, synthetic construct
  misc_feature 1..20: note = Description of Artificial Sequence: Synthetic oligonucleotide
  misc_feature 1..20: note = Target: FXN; (+) strand; PAM type: YTN; PAM sequence: CTA
  source 1..20: mol_type = other DNA
gcctgggtgacagagcgaga

SEQ ID NO: 34595 - DNA, 20 bp, synthetic construct
  misc_feature 1..20: note = Description of Artificial Sequence: Synthetic oligonucleotide
  misc_feature 1..20: note = Target: FXN; (+) strand; PAM type: YTN; PAM sequence: CTG
  source 1..20: mol_type = other DNA
ggtgacagagcgagactcca

SEQ ID NO: 34596 - DNA, 20 bp, synthetic construct
  misc_feature 1..20: note = Description of Artificial Sequence: Synthetic oligonucleotide
  misc_feature 1..20: note = Target: FXN; (+) strand; PAM type: YTN; PAM sequence: CTC
  source 1..20: mol_type = other DNA
catctcaaaaaaaaaaaaaa

SEQ ID NO: 34597 - DNA, 20 bp, synthetic construct
  misc_feature 1..20: note = Description of Artificial Sequence: Synthetic oligonucleotide
  misc_feature 1..20: note = Target: FXN; (+) strand; PAM type: YTN; PAM sequence: CTC
  source 1..20: mol_type = other DNA
aaaaaaaaaaaaaagactca

SEQ ID NO: 34598 - DNA, 20 bp, synthetic construct
  misc_feature 1..20: note = Description of Artificial Sequence: Synthetic oligonucleotide
  misc_feature 1..20: note = Target: FXN; (+) strand; PAM type: YTN; PAM sequence: CTC
  source 1..20: mol_type = other DNA
accagctgtggccactgtct

SEQ ID NO: 34599 - DNA, 20 bp, synthetic construct
  misc_feature 1..20: note = Description of Artificial Sequence: Synthetic oligonucleotide
  misc_feature 1..20: note = Target: FXN; (+) strand; PAM type: YTN; PAM sequence: CTG
  source 1..20: mol_type = other DNA
tggccactgtctgtgctaat

SEQ ID NO: 34600 - DNA, 20 bp, synthetic construct
  misc_feature 1..20: note = Description of Artificial Sequence: Synthetic oligonucleotide
  misc_feature 1..20: note = Target: FXN; (+) strand; PAM type: YTN; PAM sequence: CTG
  source 1..20: mol_type = other DNA
tctgtgctaattggctagtg

SEQ ID NO: 34601 - DNA, 20 bp, synthetic construct
  misc_feature 1..20: note = Description of Artificial Sequence: Synthetic oligonucleotide
  misc_feature 1..20: note = Target: FXN; (+) strand; PAM type: YTN; PAM sequence: CTG
  source 1..20: mol_type = other DNA
tgctaattggctagtgcctg

SEQ ID NO: 34602 - DNA, 20 bp, synthetic construct
  misc_feature 1..20: note = Description of Artificial Sequence: Synthetic oligonucleotide
  misc_feature 1..20: note = Target: FXN; (+) strand; PAM type: YTN; PAM sequence: CTA
  source 1..20: mol_type = other DNA
attggctagtgcctgcatct

SEQ ID NO: 34603 - DNA, 20 bp, synthetic construct
  misc_feature 1..20: note = Description of Artificial Sequence: Synthetic oligonucleotide
  misc_feature 1..20: note = Target: FXN; (+) strand; PAM type: YTN; PAM sequence: TTG
  source 1..20: mol_type = other DNA
gctagtgcctgcatctcaga

SEQ ID NO: 34604 - DNA, 20 bp, synthetic construct
  misc_feature 1..20: note = Description of Artificial Sequence: Synthetic oligonucleotide
  misc_feature 1..20: note = Target: FXN; (+) strand; PAM type: YTN; PAM sequence: CTA
  source 1..20: mol_type = other DNA
gtgcctgcatctcagaaact

SEQ ID NO: 34605 - DNA, 20 bp, synthetic construct
  misc_feature 1..20: note = Description of Artificial Sequence: Synthetic oligonucleotide
  misc_feature 1..20: note = Target: FXN; (+) strand; PAM type: YTN; PAM sequence: CTG
  source 1..20: mol_type = other DNA
catctcagaaactgctacat

SEQ ID NO: 34606 - DNA, 20 bp, synthetic construct
  misc_feature 1..20: note = Description of Artificial Sequence: Synthetic oligonucleotide
  misc_feature 1..20: note = Target: FXN; (+) strand; PAM type: YTN; PAM sequence: CTC
  source 1..20: mol_type = other DNA
agaaactgctacatattttg

SEQ ID NO: 34607 - DNA, 20 bp, synthetic construct
  misc_feature 1..20: note = Description of Artificial Sequence: Synthetic oligonucleotide
  misc_feature 1..20: note = Target: FXN; (+) strand; PAM type: YTN; PAM sequence: CTG
  source 1..20: mol_type = other DNA
ctacatattttgactattcc

SEQ ID NO: 34608 - DNA, 20 bp, synthetic construct
  misc_feature 1..20: note = Description of Artificial Sequence: Synthetic oligonucleotide
  misc_feature 1..20: note = Target: FXN; (+) strand; PAM type: YTN; PAM sequence: CTA
  source 1..20: mol_type = other DNA
catattttgactattccccc

SEQ ID NO: 34609 - DNA, 20 bp, synthetic construct
  misc_feature 1..20: note = Description of Artificial Sequence: Synthetic oligonucleotide
  misc_feature 1..20: note = Target: FXN; (+) strand; PAM type: YTN; PAM sequence: TTT
  source 1..20: mol_type = other DNA
tgactattccccctgcactt

SEQ ID NO: 34610 - DNA, 20 bp, synthetic construct
  misc_feature 1..20: note = Description of Artificial Sequence: Synthetic oligonucleotide
  misc_feature 1..20: note = Target: FXN; (+) strand; PAM type: YTN; PAM sequence: TTT
  source 1..20: mol_type = other DNA
gactattccccctgcactta

SEQ ID NO: 34611 - DNA, 20 bp, synthetic construct
  misc_feature 1..20: note = Description of Artificial Sequence: Synthetic oligonucleotide
  misc_feature 1..20: note = Target: FXN; (+) strand; PAM type: YTN; PAM sequence: TTG
  source 1..20: mol_type = other DNA
actattccccctgcacttaa

SEQ ID NO: 34612 - DNA, 20 bp, synthetic construct
  misc_feature 1..20: note = Description of Artificial Sequence: Synthetic oligonucleotide
  misc_feature 1..20: note = Target: FXN; (+) strand; PAM type: YTN; PAM sequence: CTA
  source 1..20: mol_type = other DNA
ttccccctgcacttaagggc

SEQ ID NO: 34613 - DNA, 20 bp, synthetic construct
  misc_feature 1..20: note = Description of Artificial Sequence: Synthetic oligonucleotide
  misc_feature 1..20: note = Target: FXN; (+) strand; PAM type: YTN; PAM sequence: TTC
  source 1..20: mol_type = other DNA
cccctgcacttaagggcatg

SEQ ID NO: 34614 - DNA, 20 bp, synthetic construct
  misc_feature 1..20: note = Description of Artificial Sequence: Synthetic oligonucleotide
  misc_feature 1..20: note = Target: FXN; (+) strand; PAM type: YTN; PAM sequence: CTG
  source 1..20: mol_type = other DNA
cacttaagggcatgcacact

SEQ ID NO: 34615 - DNA, 20 bp, synthetic construct
  misc_feature 1..20: note = Description of Artificial Sequence: Synthetic oligonucleotide
  misc_feature 1..20: note = Target: FXN; (+) strand; PAM type: YTN; PAM sequence: CTT
  source 1..20: mol_type = other DNA
aagggcatgcacactcccaa

SEQ ID NO: 34616 - DNA, 20 bp, synthetic construct
  misc_feature 1..20: note = Description of Artificial Sequence: Synthetic oligonucleotide
  misc_feature 1..20: note = Target: FXN; (+) strand; PAM type: YTN; PAM sequence: TTA
  source 1..20: mol_type = other DNA
agggcatgcacactcccaaa

SEQ ID NO: 34617 - DNA, 20 bp, synthetic construct
  misc_feature 1..20: note = Description of Artificial Sequence: Synthetic oligonucleotide
  misc_feature 1..20: note = Target: FXN; (+) strand; PAM type: YTN; PAM sequence: CTC
  source 1..20: mol_type = other DNA
ccaaaatagactcagattgt

SEQ ID NO: 34618 - DNA, 20 bp, synthetic construct
  misc_feature 1..20: note = Description of Artificial Sequence: Synthetic oligonucleotide
  misc_feature 1..20: note = Target: FXN; (+) strand; PAM type: YTN; PAM sequence: CTC
  source 1..20: mol_type = other DNA
agattgtctaaggaataatg

SEQ ID NO: 34619 - DNA, 20 bp, synthetic construct
  misc_feature 1..20: note = Description of Artificial Sequence: Synthetic oligonucleotide
  misc_feature 1..20: note = Target: FXN; (+) strand; PAM type: YTN; PAM sequence: TTG
  source 1..20: mol_type = other DNA
tctaaggaataatgatgatg

SEQ ID NO: 34620 - DNA, 20 bp, synthetic construct
  misc_feature 1..20: note = Description of Artificial Sequence: Synthetic oligonucleotide
  misc_feature 1..20: note = Target: FXN; (+) strand; PAM type: YTN; PAM sequence: CTA
  source 1..20: mol_type = other DNA
aggaataatgatgatgatga

SEQ ID NO: 34621 - DNA, 20 bp, synthetic construct
  misc_feature 1..20: note = Description of Artificial Sequence: Synthetic oligonucleotide
  misc_feature 1..20: note = Target: FXN; (+) strand; PAM type: YTN; PAM sequence: CTC
  source 1..20: mol_type = other DNA
tttatctggtctatttgtag

SEQ ID NO: 34622 - DNA, 20 bp, synthetic construct
  misc_feature 1..20: note = Description of Artificial Sequence: Synthetic oligonucleotide
  misc_feature 1..20: note = Target: FXN; (+) strand; PAM type: YTN; PAM sequence: CTT
  source 1..20: mol_type = other DNA
tatctggtctatttgtagtc

SEQ ID NO: 34623 - DNA, 20 bp, synthetic construct
  misc_feature 1..20: note = Description of Artificial Sequence: Synthetic oligonucleotide
  misc_feature 1..20: note = Target: FXN; (+) strand; PAM type: YTN; PAM sequence: TTT
  source 1..20: mol_type = other DNA
atctggtctatttgtagtca

SEQ ID NO: 34624 - DNA, 20 bp, synthetic construct
  misc_feature 1..20: note = Description of Artificial Sequence: Synthetic oligonucleotide
  misc_feature 1..20: note = Target: FXN; (+) strand; PAM type: YTN; PAM sequence: TTA
  source 1..20: mol_type = other DNA
tctggtctatttgtagtcag

SEQ ID NO: 34625 - DNA, 20 bp, synthetic construct
  misc_feature 1..20: note = Description of Artificial Sequence: Synthetic oligonucleotide
  misc_feature 1..20: note = Target: FXN; (+) strand; PAM type: YTN; PAM sequence: CTG
  source 1..20: mol_type = other DNA
gtctatttgtagtcagttcc

SEQ ID NO: 34626 - DNA, 20 bp, synthetic construct
  misc_feature 1..20: note = Description of Artificial Sequence: Synthetic oligonucleotide
  misc_feature 1..20: note = Target: FXN; (+) strand; PAM type: YTN; PAM sequence: CTA
  source 1..20: mol_type = other DNA
tttgtagtcagttccaaaag

SEQ ID NO: 34627 - DNA, 20 bp, synthetic construct
  misc_feature 1..20: note = Description of Artificial Sequence: Synthetic oligonucleotide
  misc_feature 1..20: note = Target: FXN; (+) strand; PAM type: YTN; PAM sequence: TTT
  source 1..20: mol_type = other DNA
gtagtcagttccaaaagcat

SEQ ID NO: 34628 - DNA, 20 bp, synthetic construct
  misc_feature 1..20: note = Description of Artificial Sequence: Synthetic oligonucleotide
  misc_feature 1..20: note = Target: FXN; (+) strand; PAM type: YTN; PAM sequence: TTG
  source 1..20: mol_type = other DNA
tagtcagttccaaaagcatt

SEQ ID NO: 34629 - DNA, 20 bp, synthetic construct
  misc_feature 1..20: note = Description of Artificial Sequence: Synthetic oligonucleotide
  misc_feature 1..20: note = Target: FXN; (+) strand; PAM type: YTN; PAM sequence: TTC
  source 1..20: mol_type = other DNA
caaaagcattaagaatttct

SEQ ID NO: 34630 - DNA, 20 bp, synthetic construct
  misc_feature 1..20: note = Description of Artificial Sequence: Synthetic oligonucleotide
  misc_feature 1..20: note = Target: FXN; (+) strand; PAM type: YTN; PAM sequence: TTA
  source 1..20: mol_type = other DNA
agaatttctgctgaactaat

SEQ ID NO: 34631 - DNA, 20 bp, synthetic construct
  misc_feature 1..20: note = Description of Artificial Sequence: Synthetic oligonucleotide
  misc_feature 1..20: note = Target: FXN; (+) strand; PAM type: YTN; PAM sequence: TTT
  source 1..20: mol_type = other DNA
ctgctgaactaatgcagcta

SEQ ID NO: 34632 - DNA, 20 bp, synthetic construct
  misc_feature 1..20: note = Description of Artificial Sequence: Synthetic oligonucleotide
  misc_feature 1..20: note = Target: FXN; (+) strand; PAM type: YTN; PAM sequence: TTC
  source 1..20: mol_type = other DNA
tgctgaactaatgcagctag

SEQ ID NO: 34633 - DNA, 20 bp, synthetic construct
  misc_feature 1..20: note = Description of Artificial Sequence: Synthetic oligonucleotide
  misc_feature 1..20: note = Target: FXN; (+) strand; PAM type: YTN; PAM sequence: CTG
  source 1..20: mol_type = other DNA
ctgaactaatgcagctagtt

SEQ ID NO: 34634 - DNA, 20 bp, synthetic construct
  misc_feature 1..20: note = Description of Artificial Sequence: Synthetic oligonucleotide
  misc_feature 1..20: note = Target: FXN; (+) strand; PAM type: YTN; PAM sequence: CTG
  source 1..20: mol_type = other DNA
aactaatgcagctagtttct

SEQ ID NO: 34635 - DNA, 20 bp, synthetic construct
  misc_feature 1..20: note = Description of Artificial Sequence: Synthetic oligonucleotide
  misc_feature 1..20: note = Target: FXN; (+) strand; PAM type: YTN; PAM sequence: CTA
  source 1..20: mol_type = other DNA
atgcagctagtttctttcct

SEQ ID NO: 34636 - DNA, 20 bp, synthetic construct
  misc_feature 1..20: note = Description of Artificial Sequence: Synthetic oligonucleotide
  misc_feature 1..20: note = Target: FXN; (+) strand; PAM type: YTN; PAM sequence: CTA
  source 1..20: mol_type = other DNA
gtttctttcctgtcaccact

SEQ ID NO: 34637 - DNA, 20 bp, synthetic construct
  misc_feature 1..20: note = Description of Artificial Sequence: Synthetic oligonucleotide
  misc_feature 1..20: note = Target: FXN; (+) strand; PAM type: YTN; PAM sequence: TTT
  source 1..20: mol_type = other DNA
ctttcctgtcaccactttcc

SEQ ID NO: 34638 - DNA, 20 bp, synthetic construct
  misc_feature 1..20: note = Description of Artificial Sequence: Synthetic oligonucleotide
  misc_feature 1..20: note = Target: FXN; (+) strand; PAM type: YTN; PAM sequence: TTC
  source 1..20: mol_type = other DNA
tttcctgtcaccactttcct

SEQ ID NO: 34639 - DNA, 20 bp, synthetic construct
  misc_feature 1..20: note = Description of Artificial Sequence: Synthetic oligonucleotide
  misc_feature 1..20: note = Target: FXN; (+) strand; PAM type: YTN; PAM sequence: CTT
  source 1..20: mol_type = other DNA
tcctgtcaccactttccttc

SEQ ID NO: 34640 - DNA, 20 bp, synthetic construct
  misc_feature 1..20: note = Description of Artificial Sequence: Synthetic oligonucleotide
  misc_feature 1..20: note = Target: FXN; (+) strand; PAM type: YTN; PAM sequence: TTT
  source 1..20: mol_type = other DNA
cctgtcaccactttccttcc

SEQ ID NO: 34641 - DNA, 20 bp, synthetic construct
  misc_feature 1..20: note = Description of Artificial Sequence: Synthetic oligonucleotide
  misc_feature 1..20: note = Target: FXN; (+) strand; PAM type: YTN; PAM sequence: TTC
  source 1..20: mol_type = other DNA
ctgtcaccactttccttcca

SEQ ID NO: 34642 - DNA, 20 bp, synthetic construct
  misc_feature 1..20: note = Description of Artificial Sequence: Synthetic oligonucleotide
  misc_feature 1..20: note = Target: FXN; (+) strand; PAM type: YTN; PAM sequence: CTG
  source 1..20: mol_type = other DNA
tcaccactttccttccaaaa

SEQ ID NO: 34643 - DNA, 20 bp, synthetic construct
  misc_feature 1..20: note = Description of Artificial Sequence: Synthetic oligonucleotide
  misc_feature 1..20: note = Target: FXN; (+) strand; PAM type: YTN; PAM sequence: CTT
  source 1..20: mol_type = other DNA
tccttccaaaatagtttcaa

SEQ ID NO: 34644 - DNA, 20 bp, synthetic construct
  misc_feature 1..20: note = Description of Artificial Sequence: Synthetic oligonucleotide
  misc_feature 1..20: note = Target: FXN; (+) strand; PAM type: YTN; PAM sequence: TTT
  source 1..20: mol_type = other DNA
ccttccaaaatagtttcaag

SEQ ID NO: 34645 - DNA, 20 bp, synthetic construct
  misc_feature 1..20: note = Description of Artificial Sequence: Synthetic oligonucleotide
  misc_feature 1..20: note = Target: FXN; (+) strand; PAM type: YTN; PAM sequence: TTC
  source 1..20: mol_type = other DNA
cttccaaaatagtttcaaga

SEQ ID NO: 34646 - DNA, 20 bp, synthetic construct
  misc_feature 1..20: note = Description of Artificial Sequence: Synthetic oligonucleotide
  misc_feature 1..20: note = Target: FXN; (+) strand; PAM type: YTN; PAM sequence: CTT
  source 1..20: mol_type = other DNA
ccaaaatagtttcaagatct

SEQ ID NO: 34647 - DNA, 20 bp, synthetic construct
  misc_feature 1..20: note = Description of Artificial Sequence: Synthetic oligonucleotide
  misc_feature 1..20: note = Target: FXN; (+) strand; PAM type: YTN; PAM sequence: TTC
  source 1..20: mol_type = other DNA
caaaatagtttcaagatctg

SEQ ID NO: 34648 - DNA, 20 bp, synthetic construct
  misc_feature 1..20: note = Description of Artificial Sequence: Synthetic oligonucleotide
  misc_feature 1..20: note = Target: FXN; (+) strand; PAM type: YTN; PAM sequence: TTT
  source 1..20: mol_type = other DNA
caagatctgtgggggaaaaa

SEQ ID NO: 34649 - DNA, 20 bp, synthetic construct
  misc_feature 1..20: note = Description of Artificial Sequence: Synthetic oligonucleotide
  misc_feature 1..20: note = Target: FXN; (+) strand; PAM type: YTN; PAM sequence: TTC
  source 1..20: mol_type = other DNA
aagatctgtgggggaaaaaa

SEQ ID NO: 34650 - DNA, 20 bp, synthetic construct
  misc_feature 1..20: note = Description of Artificial Sequence: Synthetic oligonucleotide
  misc_feature 1..20: note = Target: FXN; (+) strand; PAM type: YTN; PAM sequence: CTG
  source 1..20: mol_type = other DNA
tgggggaaaaaatctattta

SEQ ID NO: 34651 - DNA, 20 bp, synthetic construct
  misc_feature 1..20: note = Description of Artificial Sequence: Synthetic oligonucleotide
  misc_feature 1..20: note = Target: FXN; (+) strand; PAM type: YTN; PAM sequence: CTA
  source 1..20: mol_type = other DNA
tttacagtgaacagactggt

SEQ ID NO: 34652 - DNA, 20 bp, synthetic construct
  misc_feature 1..20: note = Description of Artificial Sequence: Synthetic oligonucleotide
  misc_feature 1..20: note = Target: FXN; (+) strand; PAM type: YTN; PAM sequence: TTT
  source 1..20: mol_type = other DNA
acagtgaacagactggtggg

SEQ ID NO: 34653 - DNA, 20 bp, synthetic construct
  misc_feature 1..20: note = Description of Artificial Sequence: Synthetic oligonucleotide
  misc_feature 1..20: note = Target: FXN; (+) strand; PAM type: YTN; PAM sequence: TTA
  source 1..20: mol_type = other DNA
cagtgaacagactggtggga

SEQ ID NO: 34654 - DNA, 20 bp, synthetic construct
  misc_feature 1..20: note = Description of Artificial Sequence: Synthetic oligonucleotide
  misc_feature 1..20: note = Target: FXN; (+) strand; PAM type: YTN; PAM sequence: CTG
  source 1..20: mol_type = other DNA
gtgggaggaagttgagcatt

SEQ ID NO: 34655 - DNA, 20 bp, synthetic construct
  misc_feature 1..20: note = Description of Artificial Sequence: Synthetic oligonucleotide
  misc_feature 1..20: note = Target: FXN; (+) strand; PAM type: YTN; PAM sequence: TTG
  source 1..20: mol_type = other DNA
agcattggggttttctgccc

SEQ ID NO: 34656 - DNA, 20 bp, synthetic construct
  misc_feature 1..20: note = Description of Artificial Sequence: Synthetic oligonucleotide
  misc_feature 1..20: note = Target: FXN; (+) strand; PAM type: YTN; PAM sequence: TTG
  source 1..20: mol_type = other DNA
gggttttctgccctgtgtaa

SEQ ID NO: 34657 - DNA, 20 bp, synthetic construct
  misc_feature 1..20: note = Description of Artificial Sequence: Synthetic oligonucleotide
  misc_feature 1..20: note = Target: FXN; (+) strand; PAM type: YTN; PAM sequence: TTT
  source 1..20: mol_type = other DNA
tctgccctgtgtaaccttgc

SEQ ID NO: 34658 - DNA, 20 bp, synthetic construct
  misc_feature 1..20: note = Description of Artificial Sequence: Synthetic oligonucleotide
  misc_feature 1..20: note = Target: FXN; (+) strand; PAM type: YTN; PAM sequence: TTT
  source 1..20: mol_type = other DNA
ctgccctgtgtaaccttgcc

SEQ ID NO: 34659 - DNA, 20 bp, synthetic construct
  misc_feature 1..20: note = Description of Artificial Sequence: Synthetic oligonucleotide
  misc_feature 1..20: note = Target: FXN; (+) strand; PAM type: YTN; PAM sequence: TTC
  source 1..20: mol_type = other DNA
tgccctgtgtaaccttgccc

SEQ ID NO: 34660 - DNA, 20 bp, synthetic construct
  misc_feature 1..20: note = Description of Artificial Sequence: Synthetic oligonucleotide
  misc_feature 1..20: note = Target: FXN; (+) strand; PAM type: YTN; PAM sequence: CTG
  source 1..20: mol_type = other DNA
ccctgtgtaaccttgcccta

SEQ ID NO: 34661 - DNA, 20 bp, synthetic construct
  misc_feature 1..20: note = Description of Artificial Sequence: Synthetic oligonucleotide
  misc_feature 1..20: note = Target: FXN; (+) strand; PAM type: YTN; PAM sequence: CTG
  source 1..20: mol_type = other DNA
tgtaaccttgccctaagttg

SEQ ID NO: 34662 - DNA, 20 bp, synthetic construct
  misc_feature 1..20: note = Description of Artificial Sequence: Synthetic oligonucleotide
  misc_feature 1..20: note = Target: FXN; (+) strand; PAM type: YTN; PAM sequence: CTT
  source 1..20: mol_type = other DNA
gccctaagttgggcagatgg

SEQ ID NO: 34663 - DNA, 20 bp, synthetic construct
  misc_feature 1..20: note = Description of Artificial Sequence: Synthetic oligonucleotide
  misc_feature 1..20: note = Target: FXN; (+) strand; PAM type: YTN; PAM sequence: TTG
  source 1..20: mol_type = other DNA
ccctaagttgggcagatggt

SEQ ID NO: 34664 - DNA, 20 bp, synthetic construct
  misc_feature 1..20: note = Description of Artificial Sequence: Synthetic oligonucleotide
  misc_feature 1..20: note = Target: FXN; (+) strand; PAM type: YTN; PAM sequence: CTA
  source 1..20: mol_type = other DNA
agttgggcagatggtatcac

SEQ ID NO: 34665 - DNA, 20 bp, synthetic construct
  misc_feature 1..20: note = Description of Artificial Sequence: Synthetic oligonucleotide
  misc_feature 1..20: note = Target: FXN; (+) strand; PAM type: YTN; PAM sequence: TTG
  source 1..20: mol_type = other DNA
ggcagatggtatcacactac

SEQ ID NO: 34666 - DNA, 20 bp, synthetic construct
  misc_feature 1..20: note = Description of Artificial Sequence: Synthetic oligonucleotide
  misc_feature 1..20: note = Target: FXN; (+) strand; PAM type: YTN; PAM sequence: CTA
  source 1..20: mol_type = other DNA
cctggacatcatctgctcat

SEQ ID NO: 34667 - DNA, 20 bp, synthetic construct
  misc_feature 1..20: note = Description of Artificial Sequence: Synthetic oligonucleotide
  misc_feature 1..20: note = Target: FXN; (+) strand; PAM type: YTN; PAM sequence: CTG
  source 1..20: mol_type = other DNA
gacatcatctgctcattcac

SEQ ID NO: 34668 - DNA, 20 bp, synthetic construct
  misc_feature 1..20: note = Description of Artificial Sequence: Synthetic oligonucleotide
  misc_feature 1..20: note = Target: FXN; (+) strand; PAM type: YTN; PAM sequence: CTG
  source 1..20: mol_type = other DNA
ctcattcactatttgaccag

SEQ ID NO: 34669 - DNA, 20 bp, synthetic construct
  misc_feature 1..20: note = Description of Artificial Sequence: Synthetic oligonucleotide
  misc_feature 1..20: note = Target: FXN; (+) strand; PAM type: YTN; PAM sequence: CTC
  source 1..20: mol_type = other DNA
attcactatttgaccagttg

SEQ ID NO: 34670 - DNA, 20 bp, synthetic construct
  misc_feature 1..20: note = Description of Artificial Sequence: Synthetic oligonucleotide
  misc_feature 1..20: note = Target: FXN; (+) strand; PAM type: YTN; PAM sequence: TTC
  source 1..20: mol_type = other DNA
actatttgaccagttggtca

SEQ ID NO: 34671 - DNA, 20 bp, synthetic construct
  misc_feature 1..20: note = Description of Artificial Sequence: Synthetic oligonucleotide
  misc_feature 1..20: note = Target: FXN; (+) strand; PAM type: YTN; PAM sequence: CTA
  source 1..20: mol_type = other DNA
tttgaccagttggtcattca

SEQ ID NO: 34672 - DNA, 20 bp, synthetic construct
  misc_feature 1..20: note = Description of Artificial Sequence: Synthetic oligonucleotide
  misc_feature 1..20: note = Target: FXN; (+) strand; PAM type: YTN; PAM sequence: TTT
  source 1..20: mol_type = other DNA
gaccagttggtcattcattc

SEQ ID NO: 34673 - DNA, 20 bp, synthetic construct
  misc_feature 1..20: note = Description of Artificial Sequence: Synthetic oligonucleotide
  misc_feature 1..20: note = Target: FXN; (+) strand; PAM type: YTN; PAM sequence: TTG
  source 1..20: mol_type = other DNA
accagttggtcattcattca

SEQ ID NO: 34674 - DNA, 20 bp, synthetic construct
  misc_feature 1..20: note = Description of Artificial Sequence: Synthetic oligonucleotide
  misc_feature 1..20: note = Target: FXN; (+) strand; PAM type: YTN; PAM sequence: TTG
  source 1..20: mol_type = other DNA
gtcattcattcacaaatgtc

SEQ ID NO: 34675 - DNA, 20 bp, synthetic construct
  misc_feature 1..20: note = Description of Artificial Sequence: Synthetic oligonucleotide
  misc_feature 1..20: note = Target: FXN; (+) strand; PAM type: YTN; PAM sequence: TTC
  source 1..20: mol_type = other DNA
attcacaaatgtcctttttg

SEQ ID NO: 34676 - DNA, 20 bp, synthetic construct
  misc_feature 1..20: note = Description of Artificial Sequence: Synthetic oligonucleotide
  misc_feature 1..20: note = Target: FXN; (+) strand; PAM type: YTN; PAM sequence: TTC
  source 1..20: mol_type = other DNA
acaaatgtcctttttgcagg

SEQ ID NO: 34677 - DNA, 20 bp, synthetic construct
  misc_feature 1..20: note = Description of Artificial Sequence: Synthetic oligonucleotide
  misc_feature 1..20: note = Target: FXN; (+) strand; PAM type: YTN; PAM sequence: CTT
  source 1..20: mol_type = other DNA
tttgcaggagggatggaggt

SEQ ID NO: 34678 - DNA, 20 bp, synthetic construct
  misc_feature 1..20: note = Description of Artificial Sequence: Synthetic oligonucleotide
  misc_feature 1..20: note = Target: FXN; (+) strand; PAM type: YTN; PAM sequence: TTT
  source 1..20: mol_type = other DNA
ttgcaggagggatggaggtg

SEQ ID NO: 34679 - DNA, 20 bp, synthetic construct
  misc_feature 1..20: note = Description of Artificial Sequence: Synthetic oligonucleotide
  misc_feature 1..20: note = Target: FXN; (+) strand; PAM type: YTN; PAM sequence: TTT
  source 1..20: mol_type = other DNA
tgcaggagggatggaggtgc

SEQ ID NO: 34680 - DNA, 20 bp, synthetic construct
  misc_feature 1..20: note = Description of Artificial Sequence: Synthetic oligonucleotide
  misc_feature 1..20: note = Target: FXN; (+) strand; PAM type: YTN; PAM sequence: TTT
  source 1..20: mol_type = other DNA
gcaggagggatggaggtgct

SEQ ID NO: 34681 - DNA, 20 bp, synthetic construct
  misc_feature 1..20: note = Description of Artificial Sequence: Synthetic oligonucleotide
  misc_feature 1..20: note = Target: FXN; (+) strand; PAM type: YTN; PAM sequence: TTG
  source 1..20: mol_type = other DNA
caggagggatggaggtgcta

SEQ ID NO: 34682 - DNA, 20 bp, synthetic construct
  misc_feature 1..20: note = Description of Artificial Sequence: Synthetic oligonucleotide
  misc_feature 1..20: note = Target: FXN; (+) strand; PAM type: YTN; PAM sequence: CTA
  source 1..20: mol_type = other DNA
gacctgcagatgctagcatg

SEQ ID NO: 34683 - DNA, 20 bp, synthetic construct
  misc_feature 1..20: note = Description of Artificial Sequence: Synthetic oligonucleotide
  misc_feature 1..20: note = Target: FXN; (+) strand; PAM type: YTN; PAM sequence: CTG
  source 1..20: mol_type = other DNA
cagatgctagcatgaaaaga

SEQ ID NO: 34684 - DNA, 20 bp, synthetic construct
  misc_feature 1..20: note = Description of Artificial Sequence: Synthetic oligonucleotide
  misc_feature 1..20: note = Target: FXN; (+) strand; PAM type: YTN; PAM sequence: CTA
  source 1..20: mol_type = other DNA
gcatgaaaagacagatctcc

SEQ ID NO: 34685 - DNA, 20 bp, synthetic construct
  misc_feature 1..20: note = Description of Artificial Sequence: Synthetic oligonucleotide
  misc_feature 1..20: note = Target: FXN; (+) strand; PAM type: YTN; PAM sequence: CTC
  source 1..20: mol_type = other DNA
ctgctgctaaggtgcttaaa

SEQ ID NO: 34686 - DNA, 20 bp, synthetic construct
  misc_feature 1..20: note = Description of Artificial Sequence: Synthetic oligonucleotide
  misc_feature 1..20: note = Target: FXN; (+) strand; PAM type: YTN; PAM sequence: CTG
  source 1..20: mol_type = other DNA
ctgctaaggtgcttaaagta

SEQ ID NO: 34687 - DNA, 20 bp, synthetic construct
  misc_feature 1..20: note = Description of Artificial Sequence: Synthetic oligonucleotide
  misc_feature 1..20: note = Target: FXN; (+) strand; PAM type: YTN; PAM sequence: CTG
  source 1..20: mol_type = other DNA
ctaaggtgcttaaagtagtg

SEQ ID NO: 34688 - DNA, 20 bp, synthetic construct
  misc_feature 1..20: note = Description of Artificial Sequence: Synthetic oligonucleotide
  misc_feature 1..20: note = Target: FXN; (+) strand; PAM type: YTN; PAM sequence: CTA
  source 1..20: mol_type = other DNA
aggtgcttaaagtagtggag

SEQ ID NO: 34689 - DNA, 20 bp, synthetic construct
  misc_feature 1..20: note = Description of Artificial Sequence: Synthetic oligonucleotide
  misc_feature 1..20: note = Target: FXN; (+) strand; PAM type: YTN; PAM sequence: CTT
  source 1..20: mol_type = other DNA
aaagtagtggaggtcagggg

SEQ ID NO: 34690 - DNA, 20 bp, synthetic construct
  misc_feature 1..20: note = Description of Artificial Sequence: Synthetic oligonucleotide
  misc_feature 1..20: note = Target: FXN; (+) strand; PAM type: YTN; PAM sequence: TTA
  source 1..20: mol_type = other DNA
aagtagtggaggtcagggga

SEQ ID NO: 34691 - DNA, 20 bp, synthetic construct
  misc_feature 1..20: note = Description of Artificial Sequence: Synthetic oligonucleotide
  misc_feature 1..20: note = Target: FXN; (+) strand; PAM type: YTN; PAM sequence: CTC
  source 1..20: mol_type = other DNA
tgaatgcagaggcaggaagc

SEQ ID NO: 34692 - DNA, 20 bp, synthetic construct
  misc_feature 1..20: note = Description of Artificial Sequence: Synthetic oligonucleotide
  misc_feature 1..20: note = Target: FXN; (+) strand; PAM type: YTN; PAM sequence: CTG
  source 1..20: mol_type = other DNA
aatgcagaggcaggaagcac

SEQ ID NO: 34693 - DNA, 20 bp, synthetic construct
  misc_feature 1..20: note = Description of Artificial Sequence: Synthetic oligonucleotide
  misc_feature 1..20: note = Target: FXN; (+) strand; PAM type: YTN; PAM sequence: CTC
  source 1..20: mol_type = other DNA
atgtggggagggaggaagtt

SEQ ID NO: 34694 - DNA, 20 bp, synthetic construct
  misc_feature 1..20: note = Description of Artificial Sequence: Synthetic oligonucleotide
  misc_feature 1..20: note = Target: FXN; (+) strand; PAM type: YTN; PAM sequence: TTG
  source 1..20: mol_type = other DNA
actgcagagaaggtgccagg

SEQ ID NO: 34695 - DNA, 20 bp, synthetic construct
  misc_feature 1..20: note = Description of Artificial Sequence: Synthetic oligonucleotide
  misc_feature 1..20: note = Target: FXN; (+) strand; PAM type: YTN; PAM sequence: CTG
  source 1..20: mol_type = other DNA
cagagaaggtgccagggggt

SEQ ID NO: 34696 - DNA, 20 bp, synthetic construct
  misc_feature 1..20: note = Description of Artificial Sequence: Synthetic oligonucleotide
  misc_feature 1..20: note = Target: FXN; (+) strand; PAM type: YTN; PAM sequence: CTT
  source 1..20: mol_type = other DNA
gagagctgtggagctagaag

SEQ ID NO: 34697 - DNA, 20 bp, synthetic construct
  misc_feature 1..20: note = Description of Artificial Sequence: Synthetic oligonucleotide
  misc_feature 1..20: note = Target: FXN; (+) strand; PAM type: YTN; PAM sequence: TTG
  source 1..20: mol_type = other DNA
agagctgtggagctagaagg

SEQ ID NO: 34698 - DNA, 20 bp, synthetic construct
  misc_feature 1..20: note = Description of Artificial Sequence: Synthetic oligonucleotide
  misc_feature 1..20: note = Target: FXN; (+) strand; PAM type: YTN; PAM sequence: CTG
  source 1..20: mol_type = other DNA
tggagctagaagggctctca

SEQ ID NO: 34699 - DNA, 20 bp, synthetic construct
  misc_feature 1..20: note = Description of Artificial Sequence: Synthetic oligonucleotide
  misc_feature 1..20: note = Target: FXN; (+) strand; PAM type: YTN; PAM sequence: CTA
  source 1..20: mol_type = other DNA
gaagggctctcacatttgct

SEQ ID NO: 34700 - DNA, 20 bp, synthetic construct
  misc_feature 1..20: note = Description of Artificial Sequence: Synthetic oligonucleotide
  misc_feature 1..20: note = Target: FXN; (+) strand; PAM type: YTN; PAM sequence: CTC
  source 1..20: mol_type = other DNA
tcacatttgcttattaatat

SEQ ID NO: 34701 - DNA, 20 bp, synthetic construct
  misc_feature 1..20: note = Description of Artificial Sequence: Synthetic oligonucleotide
  misc_feature 1..20: note = Target: FXN; (+) strand; PAM type: YTN; PAM sequence: CTC
  source 1..20: mol_type = other DNA
acatttgcttattaatatgc

SEQ ID NO: 34702 - DNA, 20 bp, synthetic construct
  misc_feature 1..20: note = Description of Artificial Sequence: Synthetic oligonucleotide
  misc_feature 1..20: note = Target: FXN; (+) strand; PAM type: YTN; PAM sequence: TTT
  source 1..20: mol_type = other DNA
gcttattaatatgccctttg

SEQ ID NO: 34703 - DNA, 20 bp, synthetic construct
  misc_feature 1..20: note = Description of Artificial Sequence: Synthetic oligonucleotide
  misc_feature 1..20: note = Target: FXN; (+) strand; PAM type: YTN; PAM sequence: TTG
  source 1..20: mol_type = other DNA
cttattaatatgccctttga

SEQ ID NO: 34704 - DNA, 20 bp, synthetic construct
  misc_feature 1..20: note = Description of Artificial Sequence: Synthetic oligonucleotide
  misc_feature 1..20: note = Target: FXN; (+) strand; PAM type: YTN; PAM sequence: CTT
  source 1..20: mol_type = other DNA
attaatatgccctttgaaaa

SEQ ID NO: 34705 - DNA, 20 bp, synthetic construct
  misc_feature 1..20: note = Description of Artificial Sequence: Synthetic oligonucleotide
  misc_feature 1..20: note = Target: FXN; (+) strand; PAM type: YTN; PAM sequence: TTA
  source 1..20: mol_type = other DNA
ttaatatgccctttgaaaaa

SEQ ID NO: 34706 - DNA, 20 bp, synthetic construct
  misc_feature 1..20: note = Description of Artificial Sequence: Synthetic oligonucleotide
  misc_feature 1..20: note = Target: FXN; (+) strand; PAM type: YTN; PAM sequence: TTA
  source 1..20: mol_type = other DNA
atatgccctttgaaaaagag

SEQ ID NO: 34707 - DNA, 20 bp, synthetic construct
  misc_feature 1..20: note = Description of Artificial Sequence: Synthetic oligonucleotide
  misc_feature 1..20: note = Target: FXN; (+) strand; PAM type: YTN; PAM sequence: CTT
  source 1..20: mol_type = other DNA
tgaaaaagagtggcctgata

SEQ ID NO: 34708 - DNA, 20 bp, synthetic construct
  misc_feature 1..20: note = Description of Artificial Sequence: Synthetic oligonucleotide
  misc_feature 1..20: note = Target: FXN; (+) strand; PAM type: YTN; PAM sequence: TTT
  source 1..20: mol_type = other DNA
gaaaaagagtggcctgatac

SEQ ID NO: 34709 - DNA, 20 bp, synthetic construct
  misc_feature 1..20: note = Description of Artificial Sequence: Synthetic oligonucleotide
  misc_feature 1..20: note = Target: FXN; (+) strand; PAM type: YTN; PAM sequence: TTG
  source 1..20: mol_type = other DNA
aaaaagagtggcctgatacc

SEQ ID NO: 34710 - DNA, 20 bp, synthetic construct
  misc_feature 1..20: note = Description of Artificial Sequence: Synthetic oligonucleotide
  misc_feature 1..20: note = Target: FXN; (+) strand; PAM type: YTN; PAM sequence: CTG
  source 1..20: mol_type = other DNA
atacctggagtcactcaaaa

SEQ ID NO: 34711 - DNA, 20 bp, synthetic construct
  misc_feature 1..20: note = Description of Artificial Sequence: Synthetic oligonucleotide
  misc_feature 1..20: note = Target: FXN; (+) strand; PAM type: YTN; PAM sequence: CTG
  source 1..20: mol_type = other DNA
gagtcactcaaaagatttcc

SEQ ID NO: 34712 - DNA, 20 bp, synthetic construct
  misc_feature 1..20: note = Description of Artificial Sequence: Synthetic oligonucleotide
  misc_feature 1..20: note = Target: FXN; (+) strand; PAM type: YTN; PAM sequence: CTC
  source 1..20: mol_type = other DNA
aaaagatttccaattccgat

SEQ ID NO: 34713 - DNA, 20 bp, synthetic construct
  misc_feature 1..20: note = Description of Artificial Sequence: Synthetic oligonucleotide
  misc_feature 1..20: note = Target: FXN; (+) strand; PAM type: YTN; PAM sequence: TTT
  source 1..20: mol_type = other DNA
ccaattccgataggaaaaag

SEQ ID NO: 34714 - DNA, 20 bp, synthetic construct
  misc_feature 1..20: note = Description of Artificial Sequence: Synthetic oligonucleotide
  misc_feature 1..20: note = Target: FXN; (+) strand; PAM type: YTN; PAM sequence: TTC
  source 1..20: mol_type = other DNA
caattccgataggaaaaagt

SEQ ID NO: 34715 - DNA, 20 bp, synthetic construct
  misc_feature 1..20: note = Description of Artificial Sequence: Synthetic oligonucleotide
  misc_feature 1..20: note = Target: FXN; (+) strand; PAM type: YTN; PAM sequence: TTC
  source 1..20: mol_type = other DNA
cgataggaaaaagtcaattt

SEQ ID NO: 34716 - DNA, 20 bp, synthetic construct
  misc_feature 1..20: note = Description of Artificial Sequence: Synthetic oligonucleotide
  misc_feature 1..20: note = Target: FXN; (+) strand; PAM type: YTN; PAM sequence: TTT
  source 1..20: mol_type = other DNA
tggcttcagtggttgcatgt

SEQ ID NO: 34717 - DNA, 20 bp, synthetic construct
  misc_feature 1..20: note = Description of Artificial Sequence: Synthetic oligonucleotide
  misc_feature 1..20: note = Target: FXN; (+) strand; PAM type: YTN; PAM sequence: TTT
  source 1..20: mol_type = other DNA
ggcttcagtggttgcatgtg

SEQ ID NO: 34718 - DNA, 20 bp, synthetic construct
  misc_feature 1..20: note = Description of Artificial Sequence: Synthetic oligonucleotide
  misc_feature 1..20: note = Target: FXN; (+) strand; PAM type: YTN; PAM sequence: TTG
  source 1..20: mol_type = other DNA
gcttcagtggttgcatgtgc

SEQ ID NO: 34719 - DNA, 20 bp, synthetic construct
  misc_feature 1..20: note = Description of Artificial Sequence: Synthetic oligonucleotide
  misc_feature 1..20: note = Target: FXN; (+) strand; PAM type: YTN; PAM sequence: CTT
  source 1..20: mol_type = other DNA
cagtggttgcatgtgcaccc

SEQ ID NO: 34720 - DNA, 20 bp, synthetic construct
  misc_feature 1..20: note = Description of Artificial Sequence: Synthetic oligonucleotide
  misc_feature 1..20: note = Target: FXN; (+) strand; PAM type: YTN; PAM sequence: TTC
  source 1..20: mol_type = other DNA
agtggttgcatgtgcacccc

SEQ ID NO: 34721 - DNA, 20 bp, synthetic construct
  misc_feature 1..20: note = Description of Artificial Sequence: Synthetic oligonucleotide
  misc_feature 1..20: note = Target: FXN; (+) strand; PAM type: YTN; PAM sequence: TTG
  source 1..20: mol_type = other DNA
catgtgcaccccctgatttg

SEQ ID NO: 34722 - DNA, 20 bp, synthetic construct
  misc_feature 1..20: note = Description of Artificial Sequence: Synthetic oligonucleotide
  misc_feature 1..20: note = Target: FXN; (+) strand; PAM type: YTN; PAM sequence: CTG
  source 1..20: mol_type = other DNA
atttgctgtatgctgaggca

SEQ ID NO: 34723 - DNA, 20 bp, synthetic construct
  misc_feature 1..20: note = Description of Artificial Sequence: Synthetic oligonucleotide
  misc_feature 1..20: note = Target: FXN; (+) strand; PAM type: YTN; PAM sequence: TTT
  source 1..20: mol_type = other DNA
gctgtatgctgaggcattgt

SEQ ID NO: 34724 - DNA, 20 bp, synthetic construct
  misc_feature 1..20: note = Description of Artificial Sequence: Synthetic oligonucleotide
  misc_feature 1..20: note = Target: FXN; (+) strand; PAM type: YTN; PAM sequence: TTG
  source 1..20: mol_type = other DNA
ctgtatgctgaggcattgtg

SEQ ID NO: 34725 - DNA, 20 bp, synthetic construct
  misc_feature 1..20: note = Description of Artificial Sequence: Synthetic oligonucleotide
  misc_feature 1..20: note = Target: FXN; (+) strand; PAM type: YTN; PAM sequence: CTG
  source 1..20: mol_type = other DNA
tatgctgaggcattgtggtg

SEQ ID NO: 34726 - DNA, 20 bp, synthetic construct
  misc_feature 1..20: note = Description of Artificial Sequence: Synthetic oligonucleotide
  misc_feature 1..20: note = Target: FXN; (+) strand; PAM type: YTN; PAM sequence: CTG
  source 1..20: mol_type = other DNA
aggcattgtggtgatggacg

SEQ ID NO: 34727 - DNA, 20 bp, synthetic construct
  misc_feature 1..20: note = Description of Artificial Sequence: Synthetic oligonucleotide
  misc_feature 1..20: note = Target: FXN; (+) strand; PAM type: YTN; PAM sequence: TTG
  source 1..20: mol_type = other DNA
tggtgatggacgcaagtgcg

SEQ ID NO: 34728 - DNA, 20 bp, synthetic construct
  misc_feature 1..20: note = Description of Artificial Sequence: Synthetic oligonucleotide
  misc_feature 1..20: note = Target: FXN; (+) strand; PAM type: YTN; PAM sequence: CTT
  source 1..20: mol_type = other DNA
gagcacgcatctgcccctag

SEQ ID NO: 34729 - DNA, 20 bp, synthetic construct
  misc_feature 1..20: note = Description of Artificial Sequence: Synthetic oligonucleotide
  misc_feature 1..20: note = Target: FXN; (+) strand; PAM type: YTN; PAM sequence: TTG
  source 1..20: mol_type = other DNA
agcacgcatctgcccctagt

SEQ ID NO: 34730 - DNA, 20 bp, synthetic construct
  misc_feature 1..20: note = Description of Artificial Sequence: Synthetic oligonucleotide
  misc_feature 1..20: note = Target: FXN; (+) strand; PAM type: YTN; PAM sequence: CTG
  source 1..20: mol_type = other DNA
cccctagttcttgccctgag

SEQ ID NO: 34731 - DNA, 20 bp, synthetic construct
  misc_feature 1..20: note = Description of Artificial Sequence: Synthetic oligonucleotide
  misc_feature 1..20: note = Target: FXN; (+) strand; PAM type: YTN; PAM sequence: CTA
  source 1..20: mol_type = other DNA
gttcttgccctgagtcctcg

SEQ ID NO: 34732 - DNA, 20 bp, synthetic construct
  misc_feature 1..20: note = Description of Artificial Sequence: Synthetic oligonucleotide
  misc_feature 1..20: note = Target: FXN; (+) strand; PAM type: YTN; PAM sequence: TTC
  source 1..20: mol_type = other DNA
ttgccctgagtcctcgaagg

SEQ ID NO: 34733 - DNA, 20 bp, synthetic construct
  misc_feature 1..20: note = Description of Artificial Sequence: Synthetic oligonucleotide
  misc_feature 1..20: note = Target: FXN; (+) strand; PAM type: YTN; PAM sequence: CTT
  source 1..20: mol_type = other DNA
gccctgagtcctcgaaggag

SEQ ID NO: 34734 - DNA, 20 bp, synthetic construct
  misc_feature 1..20: note = Description of Artificial Sequence: Synthetic oligonucleotide
  misc_feature 1..20: note = Target: FXN; (+) strand; PAM type: YTN; PAM sequence: TTG
  source 1..20: mol_type = other DNA
ccctgagtcctcgaaggagg

SEQ ID NO: 34735 - DNA, 20 bp, synthetic construct
  misc_feature 1..20: note = Description of Artificial Sequence: Synthetic oligonucleotide
  misc_feature 1..20: note = Target: FXN; (+) strand; PAM type: YTN; PAM sequence: CTG
  source 1..20: mol_type = other DNA
agtcctcgaaggaggcagga

SEQ ID NO: 34736 - DNA, 20 bp, synthetic construct
  misc_feature 1..20: note = Description of Artificial Sequence: Synthetic oligonucleotide
  misc_feature 1..20: note = Target: FXN; (+) strand; PAM type: YTN; PAM sequence: CTC
  source 1..20: mol_type = other DNA
gaaggaggcaggagagacat

SEQ ID NO: 34737 - DNA, 20 bp, synthetic construct
  misc_feature 1..20: note = Description of Artificial Sequence: Synthetic oligonucleotide
  misc_feature 1..20: note = Target: FXN; (+) strand; PAM type: YTN; PAM sequence: CTC
  source 1..20: mol_type = other DNA
atcagtgatgagaccagacc

SEQ ID NO: 34738 - DNA, 20 bp, synthetic construct
  misc_feature 1..20: note = Description of Artificial Sequence: Synthetic oligonucleotide
  misc_feature 1..20: note = Target: FXN; (+) strand; PAM type: YTN; PAM sequence: CTG
  source 1..20: mol_type = other DNA
gaactcgcgtcttatactca

SEQ ID NO: 34739 - DNA, 20 bp, synthetic construct
  misc_feature 1..20: note = Description of Artificial Sequence: Synthetic oligonucleotide
  misc_feature 1..20: note = Target: FXN; (+) strand; PAM type: YTN; PAM sequence: CTC
  source 1..20: mol_type = other DNA
gcgtcttatactcagtcctc

SEQ ID NO: 34740 - DNA, 20 bp, synthetic construct
  misc_feature 1..20: note = Description of Artificial Sequence: Synthetic oligonucleotide
  misc_feature 1..20: note = Target: FXN; (+) strand; PAM type: YTN; PAM sequence: CTT
  source 1..20: mol_type = other DNA
atactcagtcctctgccctt

SEQ ID NO: 34741 - DNA, 20 bp, synthetic construct
  misc_feature 1..20: note = Description of Artificial Sequence: Synthetic oligonucleotide
  misc_feature 1..20: note = Target: FXN; (+) strand; PAM type: YTN; PAM sequence: TTA
  source 1..20: mol_type = other DNA
tactcagtcctctgcccttt

SEQ ID NO: 34742 - DNA, 20 bp, synthetic construct
  misc_feature 1..20: note = Description of Artificial Sequence: Synthetic oligonucleotide
  misc_feature 1..20: note = Target: FXN; (+) strand; PAM type: YTN; PAM sequence: CTC
  source 1..20: mol_type = other DNA
agtcctctgccctttctgct

SEQ ID NO: 34743 - DNA, 20 bp, synthetic construct
  misc_feature 1..20: note = Description of Artificial Sequence: Synthetic oligonucleotide
  misc_feature 1..20: note = Target: FXN; (+) strand; PAM type: YTN; PAM sequence: CTC
  source 1..20: mol_type = other DNA
tgccctttctgctggattgt

SEQ ID NO: 34744 - DNA, 20 bp, synthetic construct
  misc_feature 1..20: note = Description of Artificial Sequence: Synthetic oligonucleotide
  misc_feature 1..20: note = Target: FXN; (+) strand; PAM type: YTN; PAM sequence: CTG
  source 1..20: mol_type = other DNA
ccctttctgctggattgtgg

SEQ ID NO: 34745 - DNA, 20 bp, synthetic construct
  misc_feature 1..20: note = Description of Artificial Sequence: Synthetic oligonucleotide
  misc_feature 1..20: note = Target: FXN; (+) strand; PAM type: YTN; PAM sequence: CTT
  source 1..20: mol_type = other DNA
tctgctggattgtggccccc

SEQ ID NO: 34746 - DNA, 20 bp, synthetic construct
  misc_feature 1..20: note = Description of Artificial Sequence: Synthetic oligonucleotide
  misc_feature 1..20: note = Target: FXN; (+) strand; PAM type: YTN; PAM sequence: TTT
  source 1..20: mol_type = other DNA
ctgctggattgtggcccccc

SEQ ID NO: 34747 - DNA, 20 bp, synthetic construct
  misc_feature 1..20: note = Description of Artificial Sequence: Synthetic oligonucleotide
  misc_feature 1..20: note = Target: FXN; (+) strand; PAM type: YTN; PAM sequence: TTC
  source 1..20: mol_type = other DNA
tgctggattgtggcccccca

SEQ ID NO: 34748 - DNA, 20 bp, synthetic construct
  misc_feature 1..20: note = Description of Artificial Sequence: Synthetic oligonucleotide
  misc_feature 1..20: note = Target: FXN; (+) strand; PAM type: YTN; PAM sequence: CTG
  source 1..20: mol_type = other DNA
ctggattgtggccccccagt

SEQ ID NO: 34749 - DNA, 20 bp, synthetic construct
  misc_feature 1..20: note = Description of Artificial Sequence: Synthetic oligonucleotide
  misc_feature 1..20: note = Target: FXN; (+) strand; PAM type: YTN; PAM sequence: CTG
  source 1..20: mol_type = other DNA
gattgtggccccccagtata

SEQ ID NO: 34750 - DNA, 20 bp, synthetic construct
  misc_feature 1..20: note = Description of Artificial Sequence: Synthetic oligonucleotide
  misc_feature 1..20: note = Target: FXN; (+) strand; PAM type: YTN; PAM sequence: TTG
  source 1..20: mol_type = other DNA
tggccccccagtatagggtg

SEQ ID NO: 34751 - DNA, 20 bp, synthetic construct
  misc_feature 1..20: note = Description of Artificial Sequence: Synthetic oligonucleotide
  misc_feature 1..20: note = Target: FXN; (+) strand; PAM type: YTN; PAM sequence: CTG
  source 1..20: mol_type = other DNA
gagcatttaagggccacaaa

SEQ ID NO: 34752 - DNA, 20 bp, synthetic construct
  misc_feature 1..20: note = Description of Artificial Sequence: Synthetic oligonucleotide
  misc_feature 1..20: note = Target: FXN; (+) strand; PAM type: YTN; PAM sequence: TTT
  source 1..20: mol_type = other DNA
aagggccacaaagagaacaa

SEQ ID NO: 34753 - DNA, 20 bp, synthetic construct
  misc_feature 1..20: note = Description of Artificial Sequence: Synthetic oligonucleotide
  misc_feature 1..20: note = Target: FXN; (+) strand; PAM type: YTN; PAM sequence: TTA
  source 1..20: mol_type = other DNA
agggccacaaagagaacaaa

SEQ ID NO: 34754 - DNA, 20 bp, synthetic construct
  misc_feature 1..20: note = Description of Artificial Sequence: Synthetic oligonucleotide
  misc_feature 1..20: note = Target: FXN; (+) strand; PAM type: YTN; PAM sequence: TTA
  source 1..20: mol_type = other DNA
ccaatgattgtgtgttgatt

SEQ ID NO: 34755 - DNA, 20 bp, synthetic construct
  misc_feature 1..20: note = Description of Artificial Sequence: Synthetic oligonucleotide
  misc_feature 1..20: note = Target: FXN; (+) strand; PAM type: YTN; PAM sequence: TTG
  source 1..20: mol_type = other DNA
tgtgttgattctttgagctc

SEQ ID NO: 34756 - DNA, 20 bp, synthetic construct
  misc_feature 1..20: note = Description of Artificial Sequence: Synthetic oligonucleotide
  misc_feature 1..20: note = Target: FXN; (+) strand; PAM type: YTN; PAM sequence: TTG
  source 1..20: mol_type = other DNA
attctttgagctcttttttt

SEQ ID NO: 34757 - DNA, 20 bp, synthetic construct
  misc_feature 1..20: note = Description of Artificial Sequence: Synthetic oligonucleotide
  misc_feature 1..20: note = Target: FXN; (+) strand; PAM type: YTN; PAM sequence: TTC
  source 1..20: mol_type = other DNA
tttgagctctttttttttat

SEQ ID NO: 34758 - DNA, 20 bp, synthetic construct
  misc_feature 1..20: note = Description of Artificial Sequence: Synthetic oligonucleotide
  misc_feature 1..20: note = Target: FXN; (+) strand; PAM type: YTN; PAM sequence: CTT
  source 1..20: mol_type = other DNA
tgagctctttttttttatta

SEQ ID NO: 34759 - DNA, 20 bp, synthetic construct
  misc_feature 1..20: note = Description of Artificial Sequence: Synthetic oligonucleotide
  misc_feature 1..20: note = Target: FXN; (+) strand; PAM type: YTN; PAM sequence: TTT
  source 1..20: mol_type = other DNA
gagctctttttttttattat

SEQ ID NO: 34760 - DNA, 20 bp, synthetic construct
  misc_feature 1..20: note = Description of Artificial Sequence: Synthetic oligonucleotide
  misc_feature 1..20: note = Target: FXN; (+) strand; PAM type: YTN; PAM sequence: TTG
  source 1..20: mol_type = other DNA
agctctttttttttattatt

SEQ ID NO: 34761 - DNA, 20 bp, synthetic construct
  misc_feature 1..20: note = Description of Artificial Sequence: Synthetic oligonucleotide
  misc_feature 1..20: note = Target: FXN; (+) strand; PAM type: YTN; PAM sequence: CTC
  source 1..20: mol_type = other DNA
tttttttttattattatact

SEQ ID NO: 34762 - DNA, 20 bp, synthetic construct
  misc_feature 1..20: note = Description of Artificial Sequence: Synthetic oligonucleotide
  misc_feature 1..20: note = Target: FXN; (+) strand; PAM type: YTN; PAM sequence: CTT
  source 1..20: mol_type = other DNA
tttttttattattatacttt

SEQ ID NO: 34763 - DNA, 20 bp, synthetic construct
  misc_feature 1..20: note = Description of Artificial Sequence: Synthetic oligonucleotide
  misc_feature 1..20: note = Target: FXN; (+) strand; PAM type: YTN; PAM sequence: TTT
  source 1..20: mol_type = other DNA
ttttttattattatacttta

SEQ ID NO: 34764 - DNA, 20 bp, synthetic construct
  misc_feature 1..20: note = Description of Artificial Sequence: Synthetic oligonucleotide
  misc_feature 1..20: note = Target: FXN; (+) strand; PAM type: YTN; PAM sequence: TTT
  source 1..20: mol_type = other DNA
tttttattattatactttaa

SEQ ID NO: 34765 - DNA, 20 bp, synthetic construct
  misc_feature 1..20: note = Description of Artificial Sequence: Synthetic oligonucleotide
  misc_feature 1..20: note = Target: FXN; (+) strand; PAM type: YTN; PAM sequence: TTT
  source 1..20: mol_type = other DNA
ttttattattatactttaag

SEQ ID NO: 34766 - DNA, 20 bp, synthetic construct
  misc_feature 1..20: note = Description of Artificial Sequence: Synthetic oligonucleotide
  misc_feature 1..20: note = Target: FXN; (+) strand; PAM type: YTN; PAM sequence: TTT
  source 1..20: mol_type = other DNA
tttattattatactttaagt

SEQ ID NO: 34767 - DNA, 20 bp, synthetic construct
  misc_feature 1..20: note = Description of Artificial Sequence: Synthetic oligonucleotide
  misc_feature 1..20: note = Target: FXN; (+) strand; PAM type: YTN; PAM sequence: TTT
  source 1..20: mol_type = other DNA
ttattattatactttaagtg

SEQ ID NO: 34768 - DNA, 20 bp, synthetic construct
  misc_feature 1..20: note = Description of Artificial Sequence: Synthetic oligonucleotide
  misc_feature 1..20: note = Target: FXN; (+) strand; PAM type: YTN; PAM sequence: TTT
  source 1..20: mol_type = other DNA
tattattatactttaagtgt

SEQ ID NO: 34769 - DNA, 20 bp, synthetic construct
  misc_feature 1..20: note = Description of Artificial Sequence: Synthetic oligonucleotide
  misc_feature 1..20: note = Target: FXN; (+) strand; PAM type: YTN; PAM sequence: TTT
  source 1..20: mol_type = other DNA
attattatactttaagtgtt

SEQ ID NO: 34770 - DNA, 20 bp, synthetic construct
  misc_feature 1..20: note = Description of Artificial Sequence: Synthetic oligonucleotide
  misc_feature 1..20: note = Target: FXN; (+) strand; PAM type: YTN; PAM sequence: TTA
  source 1..20: mol_type = other DNA
ttattatactttaagtgtta

SEQ ID NO: 34771 - DNA, 20 bp, synthetic construct
  misc_feature 1..20: note = Description of Artificial Sequence: Synthetic oligonucleotide
  misc_feature 1..20: note = Target: FXN; (+) strand; PAM type: YTN; PAM sequence: TTA
  source 1..20: mol_type = other DNA
ttatactttaagtgttaggg

SEQ ID NO: 34772 - DNA, 20 bp, synthetic construct
  misc_feature 1..20: note = Description of Artificial Sequence: Synthetic oligonucleotide
  misc_feature 1..20: note = Target: FXN; (+) strand; PAM type: YTN; PAM sequence: TTA
  source 1..20: mol_type = other DNA
tactttaagtgttagggtac

SEQ ID NO: 34773 - DNA, 20 bp, synthetic construct
  misc_feature 1..20: note = Description of Artificial Sequence: Synthetic oligonucleotide
  misc_feature 1..20: note = Target: FXN; (+) strand; PAM type: YTN; PAM sequence: CTT
  source 1..20: mol_type = other DNA
taagtgttagggtacatgtg

SEQ ID NO: 34774 - DNA, 20 bp, synthetic construct
  misc_feature 1..20: note = Description of Artificial Sequence: Synthetic oligonucleotide
  misc_feature 1..20: note = Target: FXN; (+) strand; PAM type: YTN; PAM sequence: TTT
  source 1..20: mol_type = other DNA
aagtgttagggtacatgtgc

SEQ ID NO: 34775 - DNA, 20 bp, synthetic construct
  misc_feature 1..20: note = Description of Artificial Sequence: Synthetic oligonucleotide
  misc_feature 1..20: note = Target: FXN; (+) strand; PAM type: YTN; PAM sequence: TTA
  source 1..20: mol_type = other DNA
agtgttagggtacatgtgca

SEQ ID NO: 34776 - DNA, 20 bp, synthetic construct
  misc_feature 1..20: note = Description of Artificial Sequence: Synthetic oligonucleotide
  misc_feature 1..20: note = Target: FXN; (+) strand; PAM type: YTN; PAM sequence: TTA
  source 1..20: mol_type = other DNA
gggtacatgtgcacaatgtg

SEQ ID NO: 34777 - DNA, 20 bp, synthetic construct
  misc_feature 1..20: note = Description of Artificial Sequence: Synthetic oligonucleotide
  misc_feature 1..20: note = Target: FXN; (+) strand; PAM type: YTN; PAM sequence: TTA
  source 1..20: mol_type = other DNA
gttacatatgtatacatgtg

SEQ ID NO: 34778 - DNA, 20 bp, synthetic construct
  misc_feature 1..20: note = Description of Artificial Sequence: Synthetic oligonucleotide
  misc_feature 1..20: note = Target: FXN; (+) strand; PAM type: YTN; PAM sequence: TTA
  source 1..20: mol_type = other DNA
catatgtatacatgtgccat

SEQ ID NO: 34779 - DNA, 20 bp, synthetic construct
  misc_feature 1..20: note = Description of Artificial Sequence: Synthetic oligonucleotide
  misc_feature 1..20: note = Target: FXN; (+) strand; PAM type: YTN; PAM sequence: CTG
  source 1..20: mol_type = other DNA
gtgtgctgcacccattaact

SEQ ID NO: 34780 - DNA, 20 bp, synthetic construct
  misc_feature 1..20: note = Description of Artificial Sequence: Synthetic oligonucleotide
  misc_feature 1..20: note = Target: FXN; (+) strand; PAM type: YTN; PAM sequence: CTG
  source 1..20: mol_type = other DNA
cacccattaactcgtcattt

SEQ ID NO: 34781 - DNA, 20 bp, synthetic construct
  misc_feature 1..20: note = Description of Artificial Sequence: Synthetic oligonucleotide
  misc_feature 1..20: note = Target: FXN; (+) strand; PAM type: YTN; PAM sequence: TTA
  source 1..20: mol_type = other DNA
actcgtcatttagcattagg

SEQ ID NO: 34782 - DNA, 20 bp, synthetic construct
  misc_feature 1..20: note = Description of Artificial Sequence: Synthetic oligonucleotide
  misc_feature 1..20: note = Target: FXN; (+) strand; PAM type: YTN; PAM sequence: CTC
  source 1..20: mol_type = other DNA
gtcatttagcattaggtata

SEQ ID NO: 34783 - DNA, 20 bp, synthetic construct
  misc_feature 1..20: note = Description of Artificial Sequence: Synthetic oligonucleotide
  misc_feature 1..20: note = Target: FXN; (+) strand; PAM type: YTN; PAM sequence: TTT
  source 1..20: mol_type = other DNA
agcattaggtatagctccta

SEQ ID NO: 34784 - DNA, 20 bp, synthetic construct
  misc_feature 1..20: note = Description of Artificial Sequence: Synthetic oligonucleotide
  misc_feature 1..20: note = Target: FXN; (+) strand; PAM type: YTN; PAM sequence: TTA
  source 1..20: mol_type = other DNA
gcattaggtatagctcctaa

SEQ ID NO: 34785 - DNA, 20 bp, synthetic construct
  misc_feature 1..20: note = Description of Artificial Sequence: Synthetic oligonucleotide
  misc_feature 1..20: note = Target: FXN; (+) strand; PAM type: YTN; PAM sequence: TTA
  source 1..20: mol_type = other DNA
ggtatagctcctaaagctat

SEQ ID NO: 34786 - DNA, 20 bp, synthetic construct
  misc_feature 1..20: note = Description of Artificial Sequence: Synthetic oligonucleotide
  misc_feature 1..20: note = Target: FXN; (+) strand; PAM type: YTN; PAM sequence: CTC
  source 1..20: mol_type = other DNA
ctaaagctatccctcccccc

SEQ ID NO: 34787 - DNA, 20 bp, synthetic construct
  misc_feature 1..20: note = Description of Artificial Sequence: Synthetic oligonucleotide
  misc_feature 1..20: note = Target: FXN; (+) strand; PAM type: YTN; PAM sequence: CTA
  source 1..20: mol_type = other DNA
aagctatccctccccccttc

SEQ ID NO: 34788 - DNA, 20 bp, synthetic construct
  misc_feature 1..20: note = Description of Artificial Sequence: Synthetic oligonucleotide
  misc_feature 1..20: note = Target: FXN; (+) strand; PAM type: YTN; PAM sequence: CTA
  source 1..20: mol_type = other DNA
tccctccccccttccccctc

SEQ ID NO: 34789 - DNA, 20 bp, synthetic construct
  misc_feature 1..20: note = Description of Artificial Sequence: Synthetic oligonucleotide
  misc_feature 1..20: note = Target: FXN; (+) strand; PAM type: YTN; PAM sequence: CTC
  source 1..20: mol_type = other DNA
cccccttccccctccctcca

SEQ ID NO: 34790 - DNA, 20 bp, synthetic construct
  misc_feature 1..20: note = Description of Artificial Sequence: Synthetic oligonucleotide
  misc_feature 1..20: note = Target: FXN; (+) strand; PAM type: YTN; PAM sequence: CTT
  source 1..20: mol_type = other DNA
ccccctccctccaccccaca

SEQ ID NO: 34791 - DNA, 20 bp, synthetic construct
  misc_feature 1..20: note = Description of Artificial Sequence: Synthetic oligonucleotide
  misc_feature 1..20: note = Target: FXN; (+) strand; PAM type: YTN; PAM sequence: TTC
  source 1..20: mol_type = other DNA
cccctccctccaccccacaa

SEQ ID NO: 34792 - DNA, 20 bp, synthetic construct
  misc_feature 1..20: note = Description of Artificial Sequence: Synthetic oligonucleotide
  misc_feature 1..20: note = Target: FXN; (+) strand; PAM type: YTN; PAM sequence: CTC
  source 1..20: mol_type = other DNA
cctccaccccacaacagtcc

SEQ ID NO: 34793 - DNA, 20 bp, synthetic construct
  misc_feature 1..20: note = Description of Artificial Sequence: Synthetic oligonucleotide
  misc_feature 1..20: note = Target: FXN; (+) strand; PAM type: YTN; PAM sequence: CTC
  source 1..20: mol_type = other DNA
caccccacaacagtccccag

SEQ ID NO: 34794 - DNA, 20 bp, synthetic construct
  misc_feature 1..20: note = Description of Artificial Sequence: Synthetic oligonucleotide
  misc_feature 1..20: note = Target: FXN; (+) strand; PAM type: YTN; PAM sequence: TTC
  source 1..20: mol_type = other DNA
cccttcctgtgaccatgtgt

SEQ ID NO: 34795 - DNA, 20 bp, synthetic construct
  misc_feature 1..20: note = Description of Artificial Sequence: Synthetic oligonucleotide
  misc_feature 1..20: note = Target: FXN; (+) strand; PAM type: YTN; PAM sequence: CTT
  source 1..20: mol_type = other DNA
cctgtgaccatgtgttctca

SEQ ID NO: 34796 - DNA, 20 bp, synthetic construct
  misc_feature 1..20: note = Description of Artificial Sequence: Synthetic oligonucleotide
  misc_feature 1..20: note = Target: FXN; (+) strand; PAM type: YTN; PAM sequence: TTC
  source 1..20: mol_type = other DNA
ctgtgaccatgtgttctcat

SEQ ID NO: 34797 - DNA, 20 bp, synthetic construct
  misc_feature 1..20: note = Description of Artificial Sequence: Synthetic oligonucleotide
  misc_feature 1..20: note = Target: FXN; (+) strand; PAM type: YTN; PAM sequence: CTG
  source 1..20: mol_type = other DNA
tgaccatgtgttctcattgt

SEQ ID NO: 34798 - DNA, 20 bp, synthetic construct
  misc_feature 1..20: note = Description of Artificial Sequence: Synthetic oligonucleotide
  misc_feature 1..20: note = Target: FXN; (+) strand; PAM type: YTN; PAM sequence: TTC
  source 1..20: mol_type = other DNA
tcattgttcagttcccacct

SEQ ID NO: 34799 - DNA, 20 bp, synthetic construct
  misc_feature 1..20: note = Description of Artificial Sequence: Synthetic oligonucleotide
  misc_feature 1..20: note = Target: FXN; (+) strand; PAM type: YTN; PAM sequence: CTC
  source 1..20: mol_type = other DNA
attgttcagttcccacctat

SEQ ID NO: 34800 - DNA, 20 bp, synthetic construct
  misc_feature 1..20: note = Description of Artificial Sequence: Synthetic oligonucleotide
  misc_feature 1..20: note = Target: FXN; (+) strand; PAM type: YTN; PAM sequence: TTG
  source 1..20: mol_type = other DNA
ttcagttcccacctatgagt

SEQ ID NO: 34801 - DNA, 20 bp, synthetic construct
  misc_feature 1..20: note = Description of Artificial Sequence: Synthetic oligonucleotide
  misc_feature 1..20: note = Target: FXN; (+) strand; PAM type: YTN; PAM sequence: TTC
  source 1..20: mol_type = other DNA
agttcccacctatgagtgag

SEQ ID NO: 34802 - DNA, 20 bp, synthetic construct
  misc_feature 1..20: note = Description of Artificial Sequence: Synthetic oligonucleotide
  misc_feature 1..20: note = Target: FXN; (+) strand; PAM type: YTN; PAM sequence: TTC
  source 1..20: mol_type = other DNA
ccacctatgagtgagaatat

SEQ ID NO: 34803 - DNA, 20 bp, synthetic construct
  misc_feature 1..20: note = Description of Artificial Sequence: Synthetic oligonucleotide
  misc_feature 1..20: note = Target: FXN; (+) strand; PAM type: YTN; PAM sequence: CTA
  source 1..20: mol_type = other DNA
tgagtgagaatatgcagtgt

SEQ ID NO: 34804 - DNA, 20 bp, synthetic construct
  misc_feature 1..20: note = Description of Artificial Sequence: Synthetic oligonucleotide
  misc_feature 1..20: note = Target: FXN; (+) strand; PAM type: YTN; PAM sequence: TTT
  source 1..20: mol_type = other DNA
gattttttgttcttgcgata

SEQ ID NO: 34805 - DNA, 20 bp, synthetic construct
  misc_feature 1..20: note = Description of Artificial Sequence: Synthetic oligonucleotide
  misc_feature 1..20: note = Target: FXN; (+) strand; PAM type: YTN; PAM sequence: TTG
  source 1..20: mol_type = other DNA
attttttgttcttgcgatag

SEQ ID NO: 34806 - DNA, 20 bp, synthetic construct
  misc_feature 1..20: note = Description of Artificial Sequence: Synthetic oligonucleotide
  misc_feature 1..20: note = Target: FXN; (+) strand; PAM type: YTN; PAM sequence: TTT
  source 1..20: mol_type = other DNA
tttgttcttgcgatagttta

SEQ ID NO: 34807 - DNA, 20 bp, synthetic construct
  misc_feature 1..20: note = Description of Artificial Sequence: Synthetic oligonucleotide
  misc_feature 1..20: note = Target: FXN; (+) strand; PAM type: YTN; PAM sequence: TTT
  source 1..20: mol_type = other DNA
ttgttcttgcgatagtttac

SEQ ID NO: 34808 - DNA, 20 bp, synthetic construct
  misc_feature 1..20: note = Description of Artificial Sequence: Synthetic oligonucleotide
  misc_feature 1..20: note = Target: FXN; (+) strand; PAM type: YTN; PAM sequence: TTT
  source 1..20: mol_type = other DNA
tgttcttgcgatagtttact

SEQ ID NO: 34809 - DNA, 20 bp, synthetic construct
  misc_feature 1..20: note = Description of Artificial Sequence: Synthetic oligonucleotide
  misc_feature 1..20: note = Target: FXN; (+) strand; PAM type: YTN; PAM sequence: TTT
  source 1..20: mol_type = other DNA
gttcttgcgatagtttactg

SEQ ID NO: 34810 - DNA, 20 bp, synthetic construct
  misc_feature 1..20: note = Description of Artificial Sequence: Synthetic oligonucleotide
  misc_feature 1..20: note = Target: FXN; (+) strand; PAM type: YTN; PAM sequence: TTG
  source 1..20: mol_type = other DNA
ttcttgcgatagtttactga

SEQ ID NO: 34811 - DNA, 20 bp, synthetic construct
  misc_feature 1..20: note = Description of Artificial Sequence: Synthetic oligonucleotide
  misc_feature 1..20: note = Target: FXN; (+) strand; PAM type: YTN; PAM sequence: TTC
  source 1..20: mol_type = other DNA
ttgcgatagtttactgagaa

SEQ ID NO: 34812 - DNA, 20 bp, synthetic construct
  misc_feature 1..20: note = Description of Artificial Sequence: Synthetic oligonucleotide
  misc_feature 1..20: note = Target: FXN; (+) strand; PAM type: YTN; PAM sequence: CTT
  source 1..20: mol_type = other DNA
gcgatagtttactgagaatg

SEQ ID NO: 34813 - DNA, 20 bp, synthetic construct
  misc_feature 1..20: note = Description of Artificial Sequence: Synthetic oligonucleotide
  misc_feature 1..20: note = Target: FXN; (+) strand; PAM type: YTN; PAM sequence: TTG
  source 1..20: mol_type = other DNA
cgatagtttactgagaatga

SEQ ID NO: 34814 - DNA, 20 bp, synthetic construct
  misc_feature 1..20: note = Description of Artificial Sequence: Synthetic oligonucleotide
  misc_feature 1..20: note = Target: FXN; (+) strand; PAM type: YTN; PAM sequence: TTT
  source 1..20: mol_type = other DNA
actgagaatgatgatttcca

SEQ ID NO: 34815 - DNA, 20 bp, synthetic construct
  misc_feature 1..20: note = Description of Artificial Sequence: Synthetic oligonucleotide
  misc_feature 1..20: note = Target: FXN; (+) strand; PAM type: YTN; PAM sequence: TTA
  source 1..20: mol_type = other DNA
ctgagaatgatgatttccag

SEQ ID NO: 34816 - DNA, 20 bp, synthetic construct
  misc_feature 1..20: note = Description of Artificial Sequence: Synthetic oligonucleotide
  misc_feature 1..20: note = Target: FXN; (+) strand; PAM type: YTN; PAM sequence: CTG
  source 1..20: mol_type = other DNA
agaatgatgatttccagttt

SEQ ID NO: 34817 - DNA, 20 bp, synthetic construct
  misc_feature 1..20: note = Description of Artificial Sequence: Synthetic oligonucleotide
  misc_feature 1..20: note = Target: FXN; (+) strand; PAM type: YTN; PAM sequence: TTT
  source 1..20: mol_type = other DNA
ccagtttcatccatgtccct

SEQ ID NO: 34818 - DNA, 20 bp, synthetic construct
  misc_feature 1..20: note = Description of Artificial Sequence: Synthetic oligonucleotide
  misc_feature 1..20: note = Target: FXN; (+) strand; PAM type: YTN; PAM sequence: TTC
  source 1..20: mol_type = other DNA
cagtttcatccatgtcccta

SEQ ID NO: 34819 - DNA, 20 bp, synthetic construct
  misc_feature 1..20: note = Description of Artificial Sequence: Synthetic oligonucleotide
  misc_feature 1..20: note = Target: FXN; (+) strand; PAM type: YTN; PAM sequence: TTT
  source 1..20: mol_type = other DNA
catccatgtccctacaaagg

SEQ ID NO: 34820 - DNA, 20 bp, synthetic construct
  misc_feature 1..20: note = Description of Artificial Sequence: Synthetic oligonucleotide
  misc_feature 1..20: note = Target: FXN; (+) strand; PAM type: YTN; PAM sequence: TTC
  source 1..20: mol_type = other DNA
atccatgtccctacaaagga

SEQ ID NO: 34821 - DNA, 20 bp, synthetic construct
  misc_feature 1..20: note = Description of Artificial Sequence: Synthetic oligonucleotide
  misc_feature 1..20: note = Target: FXN; (+) strand; PAM type: YTN; PAM sequence: CTA
  source 1..20: mol_type = other DNA
caaaggacatgaactcatca

SEQ ID NO: 34822 - DNA, 20 bp, synthetic construct
  misc_feature 1..20: note = Description of Artificial Sequence: Synthetic oligonucleotide
  misc_feature 1..20: note = Target: FXN; (+) strand; PAM type: YTN; PAM sequence: CTC
  source 1..20: mol_type = other DNA
atcattttttattgctgcat

SEQ ID NO: 34823 - DNA, 20 bp, synthetic construct
  misc_feature 1..20: note = Description of Artificial Sequence: Synthetic oligonucleotide
  misc_feature 1..20: note = Target: FXN; (+) strand; PAM type: YTN; PAM sequence: TTT
  source 1..20: mol_type = other DNA
tttattgctgcatagtattc

SEQ ID NO: 34824 - DNA, 20 bp, synthetic construct
  misc_feature 1..20: note = Description of Artificial Sequence: Synthetic oligonucleotide
  misc_feature 1..20: note = Target: FXN; (+) strand; PAM type: YTN; PAM sequence: TTT
  source 1..20: mol_type = other DNA
ttattgctgcatagtattcc

SEQ ID NO: 34825 - DNA, 20 bp, synthetic construct
  misc_feature 1..20: note = Description of Artificial Sequence: Synthetic oligonucleotide
  misc_feature 1..20: note = Target: FXN; (+) strand; PAM type: YTN; PAM sequence: TTT
  source 1..20: mol_type = other DNA
tattgctgcatagtattcca

SEQ ID NO: 34826 - DNA, 20 bp, synthetic construct
  misc_feature 1..20: note = Description of Artificial Sequence: Synthetic oligonucleotide
  misc_feature 1..20: note = Target: FXN; (+) strand; PAM type: YTN; PAM sequence: TTT
  source 1..20: mol_type = other DNA
attgctgcatagtattccat

SEQ ID NO: 34827 - DNA, 20 bp, synthetic construct
  misc_feature 1..20: note = Description of Artificial Sequence: Synthetic oligonucleotide
  misc_feature 1..20: note = Target: FXN; (+) strand; PAM type: YTN; PAM sequence: TTA
  source 1..20: mol_type = other DNA
ttgctgcatagtattccatg

SEQ ID NO: 34828 - DNA, 20 bp, synthetic construct
  misc_feature 1..20: note = Description of Artificial Sequence: Synthetic oligonucleotide
  misc_feature 1..20: note = Target: FXN; (+) strand; PAM type: YTN; PAM sequence: TTG
  source 1..20: mol_type = other DNA
ctgcatagtattccatggtg

SEQ ID NO: 34829 - DNA, 20 bp, synthetic construct
  misc_feature 1..20: note = Description of Artificial Sequence: Synthetic oligonucleotide
  misc_feature 1..20: note = Target: FXN; (+) strand; PAM type: YTN; PAM sequence: CTG
  source 1..20: mol_type = other DNA
catagtattccatggtgtat

SEQ ID NO: 34830 - DNA, 20 bp, synthetic construct
  misc_feature 1..20: note = Description of Artificial Sequence: Synthetic oligonucleotide
  misc_feature 1..20: note = Target: FXN; (+) strand; PAM type: YTN; PAM sequence: TTC
  source 1..20: mol_type = other DNA
catggtgtatatgtgccaca

SEQ ID NO: 34831 - DNA, 20 bp, synthetic construct
  misc_feature 1..20: note = Description of Artificial Sequence: Synthetic oligonucleotide
  misc_feature 1..20: note = Target: FXN; (+) strand; PAM type: YTN; PAM sequence: TTT
  source 1..20: mol_type = other DNA
tcttaatccagtctatcatt

SEQ ID NO: 34832 - DNA, 20 bp, synthetic construct
  misc_feature 1..20: note = Description of Artificial Sequence: Synthetic oligonucleotide
  misc_feature 1..20: note = Target: FXN; (+) strand; PAM type: YTN; PAM sequence: TTT
  source 1..20: mol_type = other DNA
cttaatccagtctatcattg

SEQ ID NO: 34833 - DNA, 20 bp, synthetic construct
  misc_feature 1..20: note = Description of Artificial Sequence: Synthetic oligonucleotide
  misc_feature 1..20: note = Target: FXN; (+) strand; PAM type: YTN; PAM sequence: TTC
  source 1..20: mol_type = other DNA
ttaatccagtctatcattgt

SEQ ID NO: 34834 - DNA, 20 bp, synthetic construct
  misc_feature 1..20: note = Description of Artificial Sequence: Synthetic oligonucleotide
  misc_feature 1..20: note = Target: FXN; (+) strand; PAM type: YTN; PAM sequence: CTT
  source 1..20: mol_type = other DNA
aatccagtctatcattgttg

SEQ ID NO: 34835 - DNA, 20 bp, synthetic construct
  misc_feature 1..20: note = Description of Artificial Sequence: Synthetic oligonucleotide
  misc_feature 1..20: note = Target: FXN; (+) strand; PAM type: YTN; PAM sequence: TTA
  source 1..20: mol_type = other DNA
atccagtctatcattgttgg

SEQ ID NO: 34836 - DNA, 20 bp, synthetic construct
  misc_feature 1..20: note = Description of Artificial Sequence: Synthetic oligonucleotide
  misc_feature 1..20: note = Target: FXN; (+) strand; PAM type: YTN; PAM sequence: CTA
  source 1..20: mol_type = other DNA
tcattgttggatgagctctt

SEQ ID NO: 34837 - DNA, 20 bp, synthetic construct
  misc_feature 1..20: note = Description of Artificial Sequence: Synthetic oligonucleotide
  misc_feature 1..20: note = Target: FXN; (+) strand; PAM type: YTN; PAM sequence: TTG
  source 1..20: mol_type = other DNA
ttggatgagctctttatctc

SEQ ID NO: 34838 - DNA, 20 bp, synthetic construct
  misc_feature 1..20: note = Description of Artificial Sequence: Synthetic oligonucleotide
  misc_feature 1..20: note = Target: FXN; (+) strand; PAM type: YTN; PAM sequence: TTG
  source 1..20: mol_type = other DNA
gatgagctctttatctcatg

SEQ ID NO: 34839 - DNA, 20 bp, synthetic construct
  misc_feature 1..20: note = Description of Artificial Sequence: Synthetic oligonucleotide
  misc_feature 1..20: note = Target: FXN; (+) strand; PAM type: YTN; PAM sequence: CTC
  source 1..20: mol_type = other DNA
tttatctcatggaaaaataa

SEQ ID NO: 34840 - DNA, 20 bp, synthetic construct
  misc_feature 1..20: note = Description of Artificial Sequence: Synthetic oligonucleotide
  misc_feature 1..20: note = Target: FXN; (+) strand; PAM type: YTN; PAM sequence: CTT
  source 1..20: mol_type = other DNA
tatctcatggaaaaataatt

SEQ ID NO: 34841 - DNA, 20 bp, synthetic construct
  misc_feature 1..20: note = Description of Artificial Sequence: Synthetic oligonucleotide
  misc_feature 1..20: note = Target: FXN; (+) strand; PAM type: YTN; PAM sequence: TTT
  source 1..20: mol_type = other DNA
atctcatggaaaaataattt

SEQ ID NO: 34842 - DNA, 20 bp, synthetic construct
  misc_feature 1..20: note = Description of Artificial Sequence: Synthetic oligonucleotide
  misc_feature 1..20: note = Target: FXN; (+) strand; PAM type: YTN; PAM sequence: TTA
  source 1..20: mol_type = other DNA
tctcatggaaaaataattta

SEQ ID NO: 34843 - DNA, 20 bp, synthetic construct
  misc_feature 1..20: note = Description of Artificial Sequence: Synthetic oligonucleotide
  misc_feature 1..20: note = Target: FXN; (+) strand; PAM type: YTN; PAM sequence: CTC
  source 1..20: mol_type = other DNA
atggaaaaataatttataaa

SEQ ID NO: 34844 - DNA, 20 bp, synthetic construct
  misc_feature 1..20: note = Description of Artificial Sequence: Synthetic oligonucleotide
  misc_feature 1..20: note = Target: FXN; (+) strand; PAM type: YTN; PAM sequence: TTT
  source 1..20: mol_type = other DNA
ataaaactctgtatgagagg

SEQ ID NO: 34845 - DNA, 20 bp, synthetic construct
  misc_feature 1..20: note = Description of Artificial Sequence: Synthetic oligonucleotide
  misc_feature 1..20: note = Target: FXN; (+) strand; PAM type: YTN; PAM sequence: TTA
  source 1..20: mol_type = other DNA
taaaactctgtatgagagga

SEQ ID NO: 34846 - DNA, 20 bp, synthetic construct
  misc_feature 1..20: note = Description of Artificial Sequence: Synthetic oligonucleotide
  misc_feature 1..20: note = Target: FXN; (+) strand; PAM type: YTN; PAM sequence: CTC
  source 1..20: mol_type = other DNA
tgtatgagaggagtgggaaa

SEQ ID NO: 34847 - DNA, 20 bp, synthetic construct
  misc_feature 1..20: note = Description of Artificial Sequence: Synthetic oligonucleotide
  misc_feature 1..20: note = Target: FXN; (+) strand; PAM type: YTN; PAM sequence: CTG
  source 1..20: mol_type = other DNA
tatgagaggagtgggaaata

SEQ ID NO: 34848 - DNA, 20 bp, synthetic construct
  misc_feature 1..20: note = Description of Artificial Sequence: Synthetic oligonucleotide
  misc_feature 1..20: note = Target: FXN; (+) strand; PAM type: YTN; PAM sequence: TTA
  source 1..20: mol_type = other DNA
acgggtgcggggtttctttt

SEQ ID NO: 34849 - DNA, 20 bp, synthetic construct
  misc_feature 1..20: note = Description of Artificial Sequence: Synthetic oligonucleotide
  misc_feature 1..20: note = Target: FXN; (+) strand; PAM type: YTN; PAM sequence: TTT
  source 1..20: mol_type = other DNA
ctttttgggacaatggaaat

SEQ ID NO: 34850 - DNA, 20 bp, synthetic construct
  misc_feature 1..20: note = Description of Artificial Sequence: Synthetic oligonucleotide
  misc_feature 1..20: note = Target: FXN; (+) strand; PAM type: YTN; PAM sequence: TTC
  source 1..20: mol_type = other DNA
tttttgggacaatggaaata

SEQ ID NO: 34851 - DNA, 20 bp, synthetic construct
  misc_feature 1..20: note = Description of Artificial Sequence: Synthetic oligonucleotide
  misc_feature 1..20: note = Target: FXN; (+) strand; PAM type: YTN; PAM sequence: CTT
  source 1..20: mol_type = other DNA
tttgggacaatggaaatagc

SEQ ID NO: 34852 - DNA, 20 bp, synthetic construct
  misc_feature 1..20: note = Description of Artificial Sequence: Synthetic oligonucleotide
  misc_feature 1..20: note = Target: FXN; (+) strand; PAM type: YTN; PAM sequence: TTT
  source 1..20: mol_type = other DNA
ttgggacaatggaaatagct

SEQ ID NO: 34853 - DNA, 20 bp, synthetic construct
  misc_feature 1..20: note = Description of Artificial Sequence: Synthetic oligonucleotide
  misc_feature 1..20: note = Target: FXN; (+) strand; PAM type: YTN; PAM sequence: TTT
  source 1..20: mol_type = other DNA
tgggacaatggaaatagctg

SEQ ID NO: 34854 - DNA, 20 bp, synthetic construct
  misc_feature 1..20: note = Description of Artificial Sequence: Synthetic oligonucleotide
  misc_feature 1..20: note = Target: FXN; (+) strand; PAM type: YTN; PAM sequence: TTT
  source 1..20: mol_type = other DNA
gggacaatggaaatagctgg

SEQ ID NO: 34855 - DNA, 20 bp, synthetic construct
  misc_feature 1..20: note = Description of Artificial Sequence: Synthetic oligonucleotide
  misc_feature 1..20: note = Target: FXN; (+) strand; PAM type: YTN; PAM sequence: TTG
  source 1..20: mol_type = other DNA
ggacaatggaaatagctgga

SEQ ID NO: 34856 - DNA, 20 bp, synthetic construct
  misc_feature 1..20: note = Description of Artificial Sequence: Synthetic oligonucleotide
  misc_feature 1..20: note = Target: FXN; (+) strand; PAM type: YTN; PAM sequence: CTG
  source 1..20: mol_type = other DNA
gaattagatagtggtgatgt

SEQ ID NO: 34857 - DNA, 20 bp, synthetic construct
  misc_feature 1..20: note = Description of Artificial Sequence: Synthetic oligonucleotide
  misc_feature 1..20: note = Target: FXN; (+) strand; PAM type: YTN; PAM sequence: TTA
  source 1..20: mol_type = other DNA
gatagtggtgatgtttgcac

SEQ ID NO: 34858 - DNA, 20 bp, synthetic construct
  misc_feature 1..20: note = Description of Artificial Sequence: Synthetic oligonucleotide
  misc_feature 1..20: note = Target: FXN; (+) strand; PAM type: YTN; PAM sequence: TTT
  source 1..20: mol_type = other DNA
gcacactttgtgaaatacta

SEQ ID NO: 34859 - DNA, 20 bp, synthetic construct
  misc_feature 1..20: note = Description of Artificial Sequence: Synthetic oligonucleotide
  misc_feature 1..20: note = Target: FXN; (+) strand; PAM type: YTN; PAM sequence: TTG
  source 1..20: mol_type = other DNA
cacactttgtgaaatactaa

SEQ ID NO: 34860 - DNA, 20 bp, synthetic construct
  misc_feature 1..20: note = Description of Artificial Sequence: Synthetic oligonucleotide
  misc_feature 1..20: note = Target: FXN; (+) strand; PAM type: YTN; PAM sequence: CTT
  source 1..20: mol_type = other DNA
tgtgaaatactaaaaactcc

SEQ ID NO: 34861 - DNA, 20 bp, synthetic construct
  misc_feature 1..20: note = Description of Artificial Sequence: Synthetic oligonucleotide
  misc_feature 1..20: note = Target: FXN; (+) strand; PAM type: YTN; PAM sequence: TTT
  source 1..20: mol_type = other DNA
gtgaaatactaaaaactcct

SEQ ID NO: 34862 - DNA, 20 bp, synthetic construct
  misc_feature 1..20: note = Description of Artificial Sequence: Synthetic oligonucleotide
  misc_feature 1..20: note = Target: FXN; (+) strand; PAM type: YTN; PAM sequence: TTG
  source 1..20: mol_type = other DNA
tgaaatactaaaaactcctg

SEQ ID NO: 34863 - DNA, 20 bp, synthetic construct
  misc_feature 1..20: note = Description of Artificial Sequence: Synthetic oligonucleotide
  misc_feature 1..20: note = Target: FXN; (+) strand; PAM type: YTN; PAM sequence: CTA
  source 1..20: mol_type = other DNA
aaaactcctgaattatacag

SEQ ID NO: 34864 - DNA, 20 bp, synthetic construct
  misc_feature 1..20: note = Description of Artificial Sequence: Synthetic oligonucleotide
  misc_feature 1..20: note = Target: FXN; (+) strand; PAM type: YTN; PAM sequence: CTC
  source 1..20: mol_type = other DNA
ctgaattatacagttttaag

SEQ ID NO: 34865 - DNA, 20 bp, synthetic construct
  misc_feature 1..20: note = Description of Artificial Sequence: Synthetic oligonucleotide
  misc_feature 1..20: note = Target: FXN; (+) strand; PAM type: YTN; PAM sequence: CTG
  source 1..20: mol_type = other DNA
aattatacagttttaagaaa

SEQ ID NO: 34866 - DNA, 20 bp, synthetic construct
  misc_feature 1..20: note = Description of Artificial Sequence: Synthetic oligonucleotide
  misc_feature 1..20: note = Target: FXN; (+) strand; PAM type: YTN; PAM sequence: TTA
  source 1..20: mol_type = other DNA
tacagttttaagaaactttt

SEQ ID NO: 34867 - DNA, 20 bp, synthetic construct
  misc_feature 1..20: note = Description of Artificial Sequence: Synthetic oligonucleotide
  misc_feature 1..20: note = Target: FXN; (+) strand; PAM type: YTN; PAM sequence: TTT
  source 1..20: mol_type = other DNA
taagaaacttttatttattt

SEQ ID NO: 34868 - DNA, 20 bp, synthetic construct
  misc_feature 1..20: note = Description of Artificial Sequence: Synthetic oligonucleotide
  misc_feature 1..20: note = Target: FXN; (+) strand; PAM type: YTN; PAM sequence: TTT
  source 1..20: mol_type = other DNA
aagaaacttttatttatttg

SEQ ID NO: 34869 - DNA, 20 bp, synthetic construct
  misc_feature 1..20: note = Description of Artificial Sequence: Synthetic oligonucleotide
  misc_feature 1..20: note = Target: FXN; (+) strand; PAM type: YTN; PAM sequence: TTA
  source 1..20: mol_type = other DNA
agaaacttttatttatttgt

SEQ ID NO: 34870 - DNA, 20 bp, synthetic construct
  misc_feature 1..20: note = Description of Artificial Sequence: Synthetic oligonucleotide
  misc_feature 1..20: note = Target: FXN; (+) strand; PAM type: YTN; PAM sequence: CTT
  source 1..20: mol_type = other DNA
ttatttatttgtttttgaga

SEQ ID NO: 34871 - DNA, 20 bp, synthetic construct
  misc_feature 1..20: note = Description of Artificial Sequence: Synthetic oligonucleotide
  misc_feature 1..20: note = Target: FXN; (+) strand; PAM type: YTN; PAM sequence: TTT
  source 1..20: mol_type = other DNA
tatttatttgtttttgagag

SEQ ID NO: 34872 - DNA, 20 bp, synthetic construct
  misc_feature 1..20: note = Description of Artificial Sequence: Synthetic oligonucleotide
  misc_feature 1..20: note = Target: FXN; (+) strand; PAM type: YTN; PAM sequence: TTT
  source 1..20: mol_type = other DNA
atttatttgtttttgagaga

SEQ ID NO: 34873 - DNA, 20 bp, synthetic construct
  misc_feature 1..20: note = Description of Artificial Sequence: Synthetic oligonucleotide
  misc_feature 1..20: note = Target: FXN; (+) strand; PAM type: YTN; PAM sequence: TTA
  source 1..20: mol_type = other DNA
tttatttgtttttgagagaa

SEQ ID NO: 34874 - DNA, 20 bp, synthetic construct
  misc_feature 1..20: note = Description of Artificial Sequence: Synthetic oligonucleotide
  misc_feature 1..20: note = Target: FXN; (+) strand; PAM type: YTN; PAM sequence: TTT
  source 1..20: mol_type = other DNA
atttgtttttgagagaagtt

SEQ ID NO: 34875 - DNA, 20 bp, synthetic construct
  misc_feature 1..20: note = Description of Artificial Sequence: Synthetic oligonucleotide
  misc_feature 1..20: note = Target: FXN; (+) strand; PAM type: YTN; PAM sequence: TTA
  source 1..20: mol_type = other DNA
tttgtttttgagagaagttc

SEQ ID NO: 34876 - DNA, 20 bp, synthetic construct
  misc_feature 1..20: note = Description of Artificial Sequence: Synthetic oligonucleotide
  misc_feature 1..20: note = Target: FXN; (+) strand; PAM type: YTN; PAM sequence: TTT
  source 1..20: mol_type = other DNA
gtttttgagagaagttctct

SEQ ID NO: 34877 - DNA, 20 bp, synthetic construct
  misc_feature 1..20: note = Description of Artificial Sequence: Synthetic oligonucleotide
  misc_feature 1..20: note = Target: FXN; (+) strand; PAM type: YTN; PAM sequence: TTG
  source 1..20: mol_type = other DNA
tttttgagagaagttctctg

SEQ ID NO: 34878 - DNA, 20 bp, synthetic construct
  misc_feature 1..20: note = Description of Artificial Sequence: Synthetic oligonucleotide
  misc_feature 1..20: note = Target: FXN; (+) strand; PAM type: YTN; PAM sequence: TTT
  source 1..20: mol_type = other DNA
ttgagagaagttctctgtgt

SEQ ID NO: 34879 - DNA, 20 bp, synthetic construct
  misc_feature 1..20: note = Description of Artificial Sequence: Synthetic oligonucleotide
  misc_feature 1..20: note = Target: FXN; (+) strand; PAM type: YTN; PAM sequence: TTT
  source 1..20: mol_type = other DNA
tgagagaagttctctgtgtc

SEQ ID NO: 34880 - DNA, 20 bp, synthetic construct
  misc_feature 1..20: note = Description of Artificial Sequence: Synthetic oligonucleotide
  misc_feature 1..20: note = Target: FXN; (+) strand; PAM type: YTN; PAM sequence: TTT
  source 1..20: mol_type = other DNA
gagagaagttctctgtgtca

SEQ ID NO: 34881 - DNA, 20 bp, synthetic construct
  misc_feature 1..20: note = Description of Artificial Sequence: Synthetic oligonucleotide
  misc_feature 1..20: note = Target: FXN; (+) strand; PAM type: YTN; PAM sequence: TTG
  source 1..20: mol_type = other DNA
agagaagttctctgtgtcac

SEQ ID NO: 34882 - DNA, 20 bp, synthetic construct
  misc_feature 1..20: note = Description of Artificial Sequence: Synthetic oligonucleotide
  misc_feature 1..20: note = Target: FXN; (+) strand; PAM type: YTN; PAM sequence: TTC
  source 1..20: mol_type = other DNA
tctgtgtcacccaggctgaa

SEQ ID NO: 34883 - DNA, 20 bp, synthetic construct
  misc_feature 1..20: note = Description of Artificial Sequence: Synthetic oligonucleotide
  misc_feature 1..20: note = Target: FXN; (+) strand; PAM type: YTN; PAM sequence: CTC
  source 1..20: mol_type = other DNA
tgtgtcacccaggctgaagt

SEQ ID NO: 34884 - DNA, 20 bp, synthetic construct
  misc_feature 1..20: note = Description of Artificial Sequence: Synthetic oligonucleotide
  misc_feature 1..20: note = Target: FXN; (+) strand; PAM type: YTN; PAM sequence: CTG
  source 1..20: mol_type = other DNA
tgtcacccaggctgaagtgt

SEQ ID NO: 34885 - DNA, 20 bp, synthetic construct
  misc_feature 1..20: note = Description of Artificial Sequence: Synthetic oligonucleotide
  misc_feature 1..20: note = Target: FXN; (+) strand; PAM type: YTN; PAM sequence: CTG
  source 1..20: mol_type = other DNA
aagtgtggtggcgtgatcac

SEQ ID NO: 34886 - DNA, 20 bp, synthetic construct
  misc_feature 1..20: note = Description of Artificial Sequence: Synthetic oligonucleotide
  misc_feature 1..20: note = Target: FXN; (+) strand; PAM type: YTN; PAM sequence: TTA
  source 1..20: mol_type = other DNA
ttgcagcctcaatctctgag

SEQ ID NO: 34887 - DNA, 20 bp, synthetic construct
  misc_feature 1..20: note = Description of Artificial Sequence: Synthetic oligonucleotide
  misc_feature 1..20: note = Target: FXN; (+) strand; PAM type: YTN; PAM sequence: TTG
  source 1..20: mol_type = other DNA
cagcctcaatctctgaggct

SEQ ID NO: 34888 - DNA, 20 bp, synthetic construct
  misc_feature 1..20: note = Description of Artificial Sequence: Synthetic oligonucleotide
  misc_feature 1..20: note = Target: FXN; (+) strand; PAM type: YTN; PAM sequence: CTC
  source 1..20: mol_type = other DNA
aatctctgaggctcaagcga

SEQ ID NO: 34889 - DNA, 20 bp, synthetic construct
  misc_feature 1..20: note = Description of Artificial Sequence: Synthetic oligonucleotide
  misc_feature 1..20: note = Target: FXN; (+) strand; PAM type: YTN; PAM sequence: CTC
  source 1..20: mol_type = other DNA
tgaggctcaagcgattctcc

SEQ ID NO: 34890 - DNA, 20 bp, synthetic construct
  misc_feature 1..20: note = Description of Artificial Sequence: Synthetic oligonucleotide
  misc_feature 1..20: note = Target: FXN; (+) strand; PAM type: YTN; PAM sequence: CTG
  source 1..20: mol_type = other DNA
aggctcaagcgattctccca

SEQ ID NO: 34891 - DNA, 20 bp, synthetic construct
  misc_feature 1..20: note = Description of Artificial Sequence: Synthetic oligonucleotide
  misc_feature 1..20: note = Target: FXN; (+) strand; PAM type: YTN; PAM sequence: CTC
  source 1..20: mol_type = other DNA
aagcgattctcccacctcag

SEQ ID NO: 34892 - DNA, 20 bp, synthetic construct
  misc_feature 1..20: note = Description of Artificial Sequence: Synthetic oligonucleotide
  misc_feature 1..20: note = Target: FXN; (+) strand; PAM type: YTN; PAM sequence: TTC
  source 1..20: mol_type = other DNA
tcccacctcagcctaccaag

SEQ ID NO: 34893 - DNA, 20 bp, synthetic construct
  misc_feature 1..20: note = Description of Artificial Sequence: Synthetic oligonucleotide
  misc_feature 1..20: note = Target: FXN; (+) strand; PAM type: YTN; PAM sequence: CTC
  source 1..20: mol_type = other DNA
ccacctcagcctaccaagta

SEQ ID NO: 34894 - DNA, 20 bp, synthetic construct
  misc_feature 1..20: note = Description of Artificial Sequence: Synthetic oligonucleotide
  misc_feature 1..20: note = Target: FXN; (+) strand; PAM type: YTN; PAM sequence: CTC
  source 1..20: mol_type = other DNA
agcctaccaagtagatgtga

SEQ ID NO: 34895 - DNA, 20 bp, synthetic construct
  misc_feature 1..20: note = Description of Artificial Sequence: Synthetic oligonucleotide
  misc_feature 1..20: note = Target: FXN; (+) strand; PAM type: YTN; PAM sequence: CTA
  source 1..20: mol_type = other DNA
ccaagtagatgtgactatag

SEQ ID NO: 34896 - DNA, 20 bp, synthetic construct
  misc_feature 1..20: note = Description of Artificial Sequence: Synthetic oligonucleotide
  misc_feature 1..20: note = Target: FXN; (+) strand; PAM type: YTN; PAM sequence: CTA
  source 1..20: mol_type = other DNA
taggtgcgcaccaccacacc

SEQ ID NO: 34897 - DNA, 20 bp, synthetic construct
  misc_feature 1..20: note = Description of Artificial Sequence: Synthetic oligonucleotide
  misc_feature 1..20: note = Target: FXN; (+) strand; PAM type: YTN; PAM sequence: TTT
  source 1..20: mol_type = other DNA
gtaattttttgtaaaaacaa

SEQ ID NO: 34898 - DNA, 20 bp, synthetic construct
  misc_feature 1..20: note = Description of Artificial Sequence: Synthetic oligonucleotide
  misc_feature 1..20: note = Target: FXN; (+) strand; PAM type: YTN; PAM sequence: TTG
  source 1..20: mol_type = other DNA
taattttttgtaaaaacaag

SEQ ID NO: 34899 - DNA, 20 bp, synthetic construct
  misc_feature 1..20: note = Description of Artificial Sequence: Synthetic oligonucleotide
  misc_feature 1..20: note = Target: FXN; (+) strand; PAM type: YTN; PAM sequence: TTT
  source 1..20: mol_type = other DNA
tttgtaaaaacaaggtttta

SEQ ID NO: 34900 - DNA, 20 bp, synthetic construct
  misc_feature 1..20: note = Description of Artificial Sequence: Synthetic oligonucleotide
  misc_feature 1..20: note = Target: FXN; (+) strand; PAM type: YTN; PAM sequence: TTT
  source 1..20: mol_type = other DNA
ttgtaaaaacaaggttttac

SEQ ID NO: 34901 - DNA, 20 bp, synthetic construct
  misc_feature 1..20: note = Description of Artificial Sequence: Synthetic oligonucleotide
  misc_feature 1..20: note = Target: FXN; (+) strand; PAM type: YTN; PAM sequence: TTT
  source 1..20: mol_type = other DNA
tgtaaaaacaaggttttacc

SEQ ID NO: 34902 - DNA, 20 bp, synthetic construct
  misc_feature 1..20: note = Description of Artificial Sequence: Synthetic oligonucleotide
  misc_feature 1..20: note = Target: FXN; (+) strand; PAM type: YTN; PAM sequence: TTT
  source 1..20: mol_type = other DNA
gtaaaaacaaggttttacca

SEQ ID NO: 34903 - DNA, 20 bp, synthetic construct
  misc_feature 1..20: note = Description of Artificial Sequence: Synthetic oligonucleotide
  misc_feature 1..20: note = Target: FXN; (+) strand; PAM type: YTN; PAM sequence: TTG
  source 1..20: mol_type = other DNA
taaaaacaaggttttaccat

SEQ ID NO: 34904 - DNA, 20 bp, synthetic construct
  misc_feature 1..20: note = Description of Artificial Sequence: Synthetic oligonucleotide
  misc_feature 1..20: note = Target: FXN; (+) strand; PAM type: YTN; PAM sequence: TTT
  source 1..20: mol_type = other DNA
taccatgttgcccagtctgg

SEQ ID NO: 34905 - DNA, 20 bp, synthetic construct
  misc_feature 1..20: note = Description of Artificial Sequence: Synthetic oligonucleotide
  misc_feature 1..20: note = Target: FXN; (+) strand; PAM type: YTN; PAM sequence: TTT
  source 1..20: mol_type = other DNA
accatgttgcccagtctggt

SEQ ID NO: 34906 - DNA, 20 bp, synthetic construct
  misc_feature 1..20: note = Description of Artificial Sequence: Synthetic oligonucleotide
  misc_feature 1..20: note = Target: FXN; (+) strand; PAM type: YTN; PAM sequence: TTA
  source 1..20: mol_type = other DNA
ccatgttgcccagtctggtc

SEQ ID NO: 34907 - DNA, 20 bp, synthetic construct
  misc_feature 1..20: note = Description of Artificial Sequence: Synthetic oligonucleotide
  misc_feature 1..20: note = Target: FXN; (+) strand; PAM type: YTN; PAM sequence: TTG
  source 1..20: mol_type = other DNA
cccagtctggtcttgaactc

SEQ ID NO: 34908 - DNA, 20 bp, synthetic construct
  misc_feature 1..20: note = Description of Artificial Sequence: Synthetic oligonucleotide
  misc_feature 1..20: note = Target: FXN; (+) strand; PAM type: YTN; PAM sequence: CTG
  source 1..20: mol_type = other DNA
gtcttgaactcctgggccca

SEQ ID NO: 34909 - DNA, 20 bp, synthetic construct
  misc_feature 1..20: note = Description of Artificial Sequence: Synthetic oligonucleotide
  misc_feature 1..20: note = Target: FXN; (+) strand; PAM type: YTN; PAM sequence: CTT
  source 1..20: mol_type = other DNA
gaactcctgggcccaagcga

SEQ ID NO: 34910 - DNA, 20 bp, synthetic construct
  misc_feature 1..20: note = Description of Artificial Sequence: Synthetic oligonucleotide
  misc_feature 1..20: note = Target: FXN; (+) strand; PAM type: YTN; PAM sequence: TTG
  source 1..20: mol_type = other DNA
aactcctgggcccaagcgat

SEQ ID NO: 34911 - DNA, 20 bp, synthetic construct
  misc_feature 1..20: note = Description of Artificial Sequence: Synthetic oligonucleotide
  misc_feature 1..20: note = Target: FXN; (+) strand; PAM type: YTN; PAM sequence: CTC
  source 1..20: mol_type = other DNA
ctgggcccaagcgatcctcc

SEQ ID NO: 34912 - DNA, 20 bp, synthetic construct
  misc_feature 1..20: note = Description of Artificial Sequence: Synthetic oligonucleotide
  misc_feature 1..20: note = Target: FXN; (+) strand; PAM type: YTN; PAM sequence: CTG
  source 1..20: mol_type = other DNA
ggcccaagcgatcctccctc

SEQ ID NO: 34913 - DNA, 20 bp, synthetic construct
  misc_feature 1..20: note = Description of Artificial Sequence: Synthetic oligonucleotide
  misc_feature 1..20: note = Target: FXN; (+) strand; PAM type: YTN; PAM sequence: CTC
  source 1..20: mol_type = other DNA
cctccttgggctcccgaagt

SEQ ID NO: 34914 - DNA, 20 bp, synthetic construct
  misc_feature 1..20: note = Description of Artificial Sequence: Synthetic oligonucleotide
  misc_feature 1..20: note = Target: FXN; (+) strand; PAM type: YTN; PAM sequence: CTC
  source 1..20: mol_type = other DNA
cttgggctcccgaagtgcca

SEQ ID NO: 34915 - DNA, 20 bp, synthetic construct
  misc_feature 1..20: note = Description of Artificial Sequence: Synthetic oligonucleotide
  misc_feature 1..20: note = Target: FXN; (+) strand; PAM type: YTN; PAM sequence: CTT
  source 1..20: mol_type = other DNA
gggctcccgaagtgccagga

SEQ ID NO: 34916 - DNA, 20 bp, synthetic construct
  misc_feature 1..20: note = Description of Artificial Sequence: Synthetic oligonucleotide
  misc_feature 1..20: note = Target: FXN; (+) strand; PAM type: YTN; PAM sequence: TTG
  source 1..20: mol_type = other DNA
ggctcccgaagtgccaggat

SEQ ID NO: 34917 - DNA, 20 bp, synthetic construct
  misc_feature 1..20: note = Description of Artificial Sequence: Synthetic oligonucleotide
  misc_feature 1..20: note = Target: FXN; (+) strand; PAM type: YTN; PAM sequence: CTC
  source 1..20: mol_type = other DNA
ccgaagtgccaggatacaag

SEQ ID NO: 34918 - DNA, 20 bp, synthetic construct
  misc_feature 1..20: note = Description of Artificial Sequence: Synthetic oligonucleotide
  misc_feature 1..20: note = Target: FXN; (+) strand; PAM type: YTN; PAM sequence: CTC
  source 1..20: mol_type = other DNA
agttttaagaaacttttaaa

SEQ ID NO: 34919 - DNA, 20 bp, synthetic construct
  misc_feature 1..20: note = Description of Artificial Sequence: Synthetic oligonucleotide
  misc_feature 1..20: note = Target: FXN; (+) strand; PAM type: YTN; PAM sequence: TTT
  source 1..20: mol_type = other DNA
taagaaacttttaaataaat

SEQ ID NO: 34920 - DNA, 20 bp, synthetic construct
  misc_feature 1..20: note = Description of Artificial Sequence: Synthetic oligonucleotide
  misc_feature 1..20: note = Target: FXN; (+) strand; PAM type: YTN; PAM sequence: TTT
  source 1..20: mol_type = other DNA
aagaaacttttaaataaatg

SEQ ID NO: 34921 - DNA, 20 bp, synthetic construct
  misc_feature 1..20: note = Description of Artificial Sequence: Synthetic oligonucleotide
  misc_feature 1..20: note = Target: FXN; (+) strand; PAM type: YTN; PAM sequence: TTA
  source 1..20: mol_type = other DNA
agaaacttttaaataaatga

SEQ ID NO: 34922 - DNA, 20 bp, synthetic construct
  misc_feature 1..20: note = Description of Artificial Sequence: Synthetic oligonucleotide
  misc_feature 1..20: note = Target: FXN; (+) strand; PAM type: YTN; PAM sequence: CTT
  source 1..20: mol_type = other DNA
ttaaataaatgaaatatagt

SEQ ID NO: 34923 - DNA, 20 bp, synthetic construct
  misc_feature 1..20: note = Description of Artificial Sequence: Synthetic oligonucleotide
  misc_feature 1..20: note = Target: FXN; (+) strand; PAM type: YTN; PAM sequence: TTT
  source 1..20: mol_type = other DNA
taaataaatgaaatatagtc

SEQ ID NO: 34924 - DNA, 20 bp, synthetic construct
  misc_feature 1..20: note = Description of Artificial Sequence: Synthetic oligonucleotide
  misc_feature 1..20: note = Target: FXN; (+) strand; PAM type: YTN; PAM sequence: TTT
  source 1..20: mol_type = other DNA
aaataaatgaaatatagtca

SEQ ID NO: 34925 - DNA, 20 bp, synthetic construct
  misc_feature 1..20: note = Description of Artificial Sequence: Synthetic oligonucleotide
  misc_feature 1..20: note = Target: FXN; (+) strand; PAM type: YTN; PAM sequence: TTA
  source 1..20: mol_type = other DNA
aataaatgaaatatagtcat

SEQ ID NO: 34926 - DNA, 20 bp, synthetic construct
  misc_feature 1..20: note = Description of Artificial Sequence: Synthetic oligonucleotide
  misc_feature 1..20: note = Target: FXN; (+) strand; PAM type: YTN; PAM sequence: TTT
  source 1..20: mol_type = other DNA
caggaaaaaaaatgtttttt

SEQ ID NO: 34927 - DNA, 20 bp, synthetic construct
  misc_feature 1..20: note = Description of Artificial Sequence: Synthetic oligonucleotide
  misc_feature 1..20: note = Target: FXN; (+) strand; PAM type: YTN; PAM sequence: TTC
  source 1..20: mol_type = other DNA
aggaaaaaaaatgttttttt

SEQ ID NO: 34928 - DNA, 20 bp, synthetic construct
  misc_feature 1..20: note = Description of Artificial Sequence: Synthetic oligonucleotide
  misc_feature 1..20: note = Target: FXN; (+) strand; PAM type: YTN; PAM sequence: TTT
  source 1..20: mol_type = other DNA
ttttaaacaaacttacgtat

SEQ ID NO: 34929 - DNA, 20 bp, synthetic construct
  misc_feature 1..20: note = Description of Artificial Sequence: Synthetic oligonucleotide
  misc_feature 1..20: note = Target: FXN; (+) strand; PAM type: YTN; PAM sequence: TTT
  source 1..20: mol_type = other DNA
tttaaacaaacttacgtatt

SEQ ID NO: 34930 - DNA, 20 bp, synthetic construct
  misc_feature 1..20: note = Description of Artificial Sequence: Synthetic oligonucleotide
  misc_feature 1..20: note = Target: FXN; (+) strand; PAM type: YTN; PAM sequence: TTT
  source 1..20: mol_type = other DNA
ttaaacaaacttacgtattg

SEQ ID NO: 34931 - DNA, 20 bp, synthetic construct
  misc_feature 1..20: note = Description of Artificial Sequence: Synthetic oligonucleotide
  misc_feature 1..20: note = Target: FXN; (+) strand; PAM type: YTN; PAM sequence: TTT
  source 1..20: mol_type = other DNA
taaacaaacttacgtattgt

SEQ ID NO: 34932 - DNA, 20 bp, synthetic construct
  misc_feature 1..20: note = Description of Artificial Sequence: Synthetic oligonucleotide
  misc_feature 1..20: note = Target: FXN; (+) strand; PAM type: YTN; PAM sequence: TTT
  source 1..20: mol_type = other DNA
aaacaaacttacgtattgta

SEQ ID NO: 34933 - DNA, 20 bp, synthetic construct
  misc_feature 1..20: note = Description of Artificial Sequence: Synthetic oligonucleotide
  misc_feature 1..20: note = Target: FXN; (+) strand; PAM type: YTN; PAM sequence: TTA
  source 1..20: mol_type = other DNA
aacaaacttacgtattgtat

SEQ ID NO: 34934 - DNA, 20 bp, synthetic construct
  misc_feature 1..20: note = Description of Artificial Sequence: Synthetic oligonucleotide
  misc_feature 1..20: note = Target: FXN; (+) strand; PAM type: YTN; PAM sequence: CTT
  source 1..20: mol_type = other DNA
acgtattgtataatcccagc

SEQ ID NO: 34935 - DNA, 20 bp, synthetic construct
  misc_feature 1..20: note = Description of Artificial Sequence: Synthetic oligonucleotide
  misc_feature 1..20: note = Target: FXN; (+) strand; PAM type: YTN; PAM sequence: TTA
  source 1..20: mol_type = other DNA
cgtattgtataatcccagcc

SEQ ID NO: 34936 - DNA, 20 bp, synthetic construct
  misc_feature 1..20: note = Description of Artificial Sequence: Synthetic oligonucleotide
  misc_feature 1..20: note = Target: FXN; (+) strand; PAM type: YTN; PAM sequence: TTG
  source 1..20: mol_type = other DNA
tataatcccagcccttttaa

SEQ ID NO: 34937 - DNA, 20 bp, synthetic construct
  misc_feature 1..20: note = Description of Artificial Sequence: Synthetic oligonucleotide
  misc_feature 1..20: note = Target: FXN; (+) strand; PAM type: YTN; PAM sequence: CTT
  source 1..20: mol_type = other DNA
ttaaaaaatgctttcaaaaa

SEQ ID NO: 34938 - DNA, 20 bp, synthetic construct
  misc_feature 1..20: note = Description of Artificial Sequence: Synthetic oligonucleotide
  misc_feature 1..20: note = Target: FXN; (+) strand; PAM type: YTN; PAM sequence: TTT
  source 1..20: mol_type = other DNA
taaaaaatgctttcaaaaac

SEQ ID NO: 34939 - DNA, 20 bp, synthetic construct
  misc_feature 1..20: note = Description of Artificial Sequence: Synthetic oligonucleotide
  misc_feature 1..20: note = Target: FXN; (+) strand; PAM type: YTN; PAM sequence: TTT
  source 1..20: mol_type = other DNA
aaaaaatgctttcaaaaact

SEQ ID NO: 34940 - DNA, 20 bp, synthetic construct
  misc_feature 1..20: note = Description of Artificial Sequence: Synthetic oligonucleotide
  misc_feature 1..20: note = Target: FXN; (+) strand; PAM type: YTN; PAM sequence: TTA
  source 1..20: mol_type = other DNA
aaaaatgctttcaaaaactg

SEQ ID NO: 34941 - DNA, 20 bp, synthetic construct
  misc_feature 1..20: note = Description of Artificial Sequence: Synthetic oligonucleotide
  misc_feature 1..20: note = Target: FXN; (+) strand; PAM type: YTN; PAM sequence: CTT
  source 1..20: mol_type = other DNA
tcaaaaactggcagtcaact

SEQ ID NO: 34942 - DNA, 20 bp, synthetic construct
  misc_feature 1..20: note = Description of Artificial Sequence: Synthetic oligonucleotide
  misc_feature 1..20: note = Target: FXN; (+) strand; PAM type: YTN; PAM sequence: TTT
  source 1..20: mol_type = other DNA
caaaaactggcagtcaactc

SEQ ID NO: 34943 - DNA, 20 bp, synthetic construct
  misc_feature 1..20: note = Description of Artificial Sequence: Synthetic oligonucleotide
  misc_feature 1..20: note = Target: FXN; (+) strand; PAM type: YTN; PAM sequence: TTC
  source 1..20: mol_type = other DNA
aaaaactggcagtcaactca

SEQ ID NO: 34944 - DNA, 20 bp, synthetic construct
  misc_feature 1..20: note = Description of Artificial Sequence: Synthetic oligonucleotide
  misc_feature 1..20: note = Target: FXN; (+) strand; PAM type: YTN; PAM sequence: CTG
  source 1..20: mol_type = other DNA
gcagtcaactcataaaagga

SEQ ID NO: 34945 - DNA, 20 bp, synthetic construct
  misc_feature 1..20: note = Description of Artificial Sequence: Synthetic oligonucleotide
  misc_feature 1..20: note = Target: FXN; (+) strand; PAM type: YTN; PAM sequence: CTC
  source 1..20: mol_type = other DNA
ataaaaggacaaatacttat

SEQ ID NO: 34946 - DNA, 20 bp, synthetic construct
  misc_feature 1..20: note = Description of Artificial Sequence: Synthetic oligonucleotide
  misc_feature 1..20: note = Target: FXN; (+) strand; PAM type: YTN; PAM sequence: CTT
  source 1..20: mol_type = other DNA
atgattccactgatgaagta

SEQ ID NO: 34947 - DNA, 20 bp, synthetic construct
  misc_feature 1..20: note = Description of Artificial Sequence: Synthetic oligonucleotide
  misc_feature 1..20: note = Target: FXN; (+) strand; PAM type: YTN; PAM sequence: TTA
  source 1..20: mol_type = other DNA
tgattccactgatgaagtag

SEQ ID NO: 34948 - DNA, 20 bp, synthetic construct
  misc_feature 1..20: note = Description of Artificial Sequence: Synthetic oligonucleotide
  misc_feature 1..20: note = Target: FXN; (+) strand; PAM type: YTN; PAM sequence: TTC
  source 1..20: mol_type = other DNA
cactgatgaagtagtcaaaa

SEQ ID NO: 34949 - DNA, 20 bp, synthetic construct
  misc_feature 1..20: note = Description of Artificial Sequence: Synthetic oligonucleotide
  misc_feature 1..20: note = Target: FXN; (+) strand; PAM type: YTN; PAM sequence: CTG
  source 1..20: mol_type = other DNA
atgaagtagtcaaaagtagt

SEQ ID NO: 34950 - DNA, 20 bp, synthetic construct
  misc_feature 1..20: note = Description of Artificial Sequence: Synthetic oligonucleotide
  misc_feature 1..20: note = Target: FXN; (+) strand; PAM type: YTN; PAM sequence: TTT
  source 1..20: mol_type = other DNA
ttattttcaattaaaaaaac

SEQ ID NO: 34951 - DNA, 20 bp, synthetic construct
  misc_feature 1..20: note = Description of Artificial Sequence: Synthetic oligonucleotide
  misc_feature 1..20: note = Target: FXN; (+) strand; PAM type: YTN; PAM sequence: TTT
  source 1..20: mol_type = other DNA
tattttcaattaaaaaaaca

SEQ ID NO: 34952 - DNA, 20 bp, synthetic construct
  misc_feature 1..20: note = Description of Artificial Sequence: Synthetic oligonucleotide
  misc_feature 1..20: note = Target: FXN; (+) strand; PAM type: YTN; PAM sequence: TTT
  source 1..20: mol_type = other DNA
attttcaattaaaaaaacat

SEQ ID NO: 34953 - DNA, 20 bp, synthetic construct
  misc_feature 1..20: note = Description of Artificial Sequence: Synthetic oligonucleotide
  misc_feature 1..20: note = Target: FXN; (+) strand; PAM type: YTN; PAM sequence: TTA
  source 1..20: mol_type = other DNA
ttttcaattaaaaaaacatc

SEQ ID NO: 34954 - DNA, 20 bp, synthetic construct
  misc_feature 1..20: note = Description of Artificial Sequence: Synthetic oligonucleotide
  misc_feature 1..20: note = Target: FXN; (+) strand; PAM type: YTN; PAM sequence: TTT
  source 1..20: mol_type = other DNA
tcaattaaaaaaacatcttt

SEQ ID NO: 34955 - DNA, 20 bp, synthetic construct
  misc_feature 1..20: note = Description of Artificial Sequence: Synthetic oligonucleotide
  misc_feature 1..20: note = Target: FXN; (+) strand; PAM type: YTN; PAM sequence: TTT
  source 1..20: mol_type = other DNA
caattaaaaaaacatctttt

SEQ ID NO: 34956 - DNA, 20 bp, synthetic construct
  misc_feature 1..20: note = Description of Artificial Sequence: Synthetic oligonucleotide
  misc_feature 1..20: note = Target: FXN; (+) strand; PAM type: YTN; PAM sequence: TTC
  source 1..20: mol_type = other DNA
aattaaaaaaacatcttttt

SEQ ID NO: 34957 - DNA, 20 bp, synthetic construct
  misc_feature 1..20: note = Description of Artificial Sequence: Synthetic oligonucleotide
  misc_feature 1..20: note = Target: FXN; (+) strand; PAM type: YTN; PAM sequence: TTA
  source 1..20: mol_type = other DNA
aaaaaacatcttttttttag

SEQ ID NO: 34958 - DNA, 20 bp, synthetic construct
  misc_feature 1..20: note = Description of Artificial Sequence: Synthetic oligonucleotide
  misc_feature 1..20: note = Target: FXN; (+) strand; PAM type: YTN; PAM sequence: CTT
  source 1..20: mol_type = other DNA
ttttttagtcaaaatcatag

SEQ ID NO: 34959 - DNA, 20 bp, synthetic construct
  misc_feature 1..20: note = Description of Artificial Sequence: Synthetic oligonucleotide
  misc_feature 1..20: note = Target: FXN; (+) strand; PAM type: YTN; PAM sequence: TTT
  source 1..20: mol_type = other DNA
tttttagtcaaaatcataga

SEQ ID NO: 34960 - DNA, 20 bp, synthetic construct
  misc_feature 1..20: note = Description of Artificial Sequence: Synthetic oligonucleotide
  misc_feature 1..20: note = Target: FXN; (+) strand; PAM type: YTN; PAM sequence: TTT
  source 1..20: mol_type = other DNA
ttttagtcaaaatcatagaa

SEQ ID NO: 34961 - DNA, 20 bp, synthetic construct
  misc_feature 1..20: note = Description of Artificial Sequence: Synthetic oligonucleotide
  misc_feature 1..20: note = Target: FXN; (+) strand; PAM type: YTN; PAM sequence: TTT
  source 1..20: mol_type = other DNA
tttagtcaaaatcatagaaa

SEQ ID NO: 34962 - DNA, 20 bp, synthetic construct
  misc_feature 1..20: note = Description of Artificial Sequence: Synthetic oligonucleotide
  misc_feature 1..20: note = Target: FXN; (+) strand; PAM type: YTN; PAM sequence: TTT
  source 1..20: mol_type = other DNA
ttagtcaaaatcatagaaat

SEQ ID NO: 34963 - DNA, 20 bp, synthetic construct
  misc_feature 1..20: note = Description of Artificial Sequence: Synthetic oligonucleotide
  misc_feature 1..20: note = Target: FXN; (+) strand; PAM type: YTN; PAM sequence: TTT
  source 1..20: mol_type = other DNA
tagtcaaaatcatagaaata

SEQ ID NO: 34964 - DNA, 20 bp, synthetic construct
  misc_feature 1..20: note = Description of Artificial Sequence: Synthetic oligonucleotide
  misc_feature 1..20: note = Target: FXN; (+) strand; PAM type: YTN; PAM sequence: TTT
  source 1..20: mol_type = other DNA
agtcaaaatcatagaaatag

SEQ ID NO: 34965 - DNA, 20 bp, synthetic construct
  misc_feature 1..20: note = Description of Artificial Sequence: Synthetic oligonucleotide
  misc_feature 1..20: note = Target: FXN; (+) strand; PAM type: YTN; PAM sequence: TTA
  source 1..20: mol_type = other DNA
gtcaaaatcatagaaataga

SEQ ID NO: 34966 - DNA, 20 bp, synthetic construct
  misc_feature 1..20: note = Description of Artificial Sequence: Synthetic oligonucleotide
  misc_feature 1..20: note = Target: FXN; (+) strand; PAM type: YTN; PAM sequence: TTA
  source 1..20: mol_type = other DNA
ctaagggctatgggatgggg

SEQ ID NO: 34967 - DNA, 20 bp, synthetic construct
  misc_feature 1..20: note = Description of Artificial Sequence: Synthetic oligonucleotide
  misc_feature 1..20: note = Target: FXN; (+) strand; PAM type: YTN; PAM sequence: CTA
  source 1..20: mol_type = other DNA
agggctatgggatggggaaa

SEQ ID NO: 34968 - DNA, 20 bp, synthetic construct
  misc_feature 1..20: note = Description of Artificial Sequence: Synthetic oligonucleotide
  misc_feature 1..20: note = Target: FXN; (+) strand; PAM type: YTN; PAM sequence: CTA
  source 1..20: mol_type = other DNA
tgggatggggaaattagtgt

SEQ ID NO: 34969 - DNA, 20 bp, synthetic construct
  misc_feature 1..20: note = Description of Artificial Sequence: Synthetic oligonucleotide
  misc_feature 1..20: note = Target: FXN; (+) strand; PAM type: YTN; PAM sequence: TTA
  source 1..20: mol_type = other DNA
gtgtctaatgggcatagagt

SEQ ID NO: 34970 - DNA, 20 bp, synthetic construct
  misc_feature 1..20: note = Description of Artificial Sequence: Synthetic oligonucleotide
  misc_feature 1..20: note = Target: FXN; (+) strand; PAM type: YTN; PAM sequence: CTA
  source 1..20: mol_type = other DNA
atgggcatagagtttcagtg

SEQ ID NO: 34971 - DNA, 20 bp, synthetic construct
  misc_feature 1..20: note = Description of Artificial Sequence: Synthetic oligonucleotide
  misc_feature 1..20: note = Target: FXN; (+) strand; PAM type: YTN; PAM sequence: TTT
  source 1..20: mol_type = other DNA
cagtgttacaaggtgaaaag

SEQ ID NO: 34972 - DNA, 20 bp, synthetic construct
  misc_feature 1..20: note = Description of Artificial Sequence: Synthetic oligonucleotide
  misc_feature 1..20: note = Target: FXN; (+) strand; PAM type: YTN; PAM sequence: TTC
  source 1..20: mol_type = other DNA
agtgttacaaggtgaaaagt

SEQ ID NO: 34973 - DNA, 20 bp, synthetic construct
  misc_feature 1..20: note = Description of Artificial Sequence: Synthetic oligonucleotide
  misc_feature 1..20: note = Target: FXN; (+) strand; PAM type: YTN; PAM sequence: TTA
  source 1..20: mol_type = other DNA
caaggtgaaaagttctagag

SEQ ID NO: 34974 - DNA, 20 bp, synthetic construct
  misc_feature 1..20: note = Description of Artificial Sequence: Synthetic oligonucleotide
  misc_feature 1..20: note = Target: FXN; (+) strand; PAM type: YTN; PAM sequence: TTC
  source 1..20: mol_type = other DNA
tagagttatgctgcccagca

SEQ ID NO: 34975 - DNA, 20 bp, synthetic construct
  misc_feature 1..20: note = Description of Artificial Sequence: Synthetic oligonucleotide
  misc_feature 1..20: note = Target: FXN; (+) strand; PAM type: YTN; PAM sequence: CTA
  source 1..20: mol_type = other DNA
gagttatgctgcccagcagt

SEQ ID NO: 34976 - DNA, 20 bp, synthetic construct
  misc_feature 1..20: note = Description of Artificial Sequence: Synthetic oligonucleotide
  misc_feature 1..20: note = Target: FXN; (+) strand; PAM type: YTN; PAM sequence: TTA
  source 1..20: mol_type = other DNA
tgctgcccagcagtgtgaat

SEQ ID NO: 34977 - DNA, 20 bp, synthetic construct
  misc_feature 1..20: note = Description of Artificial Sequence: Synthetic oligonucleotide
  misc_feature 1..20: note = Target: FXN; (+) strand; PAM type: YTN; PAM sequence: CTG
  source 1..20: mol_type = other DNA
cccagcagtgtgaatatact

SEQ ID NO: 34978 - DNA, 20 bp, synthetic construct
  misc_feature 1..20: note = Description of Artificial Sequence: Synthetic oligonucleotide
  misc_feature 1..20: note = Target: FXN; (+) strand; PAM type: YTN; PAM sequence: CTT
  source 1..20: mol_type = other DNA
tattgttctgtacacttaac

SEQ ID NO: 34979 - DNA, 20 bp, synthetic construct
  misc_feature 1..20: note = Description of Artificial Sequence: Synthetic oligonucleotide
  misc_feature 1..20: note = Target: FXN; (+) strand; PAM type: YTN; PAM sequence: TTT
  source 1..20: mol_type = other DNA
attgttctgtacacttaaca

SEQ ID NO: 34980 - DNA, 20 bp, synthetic construct
  misc_feature 1..20: note = Description of Artificial Sequence: Synthetic oligonucleotide
  misc_feature 1..20: note = Target: FXN; (+) strand; PAM type: YTN; PAM sequence: TTA
  source 1..20: mol_type = other DNA
ttgttctgtacacttaacat

SEQ ID NO: 34981 - DNA, 20 bp, synthetic construct
  misc_feature 1..20: note = Description of Artificial Sequence: Synthetic oligonucleotide
  misc_feature 1..20: note = Target: FXN; (+) strand; PAM type: YTN; PAM sequence: TTG
  source 1..20: mol_type = other DNA
ttctgtacacttaacatggt

SEQ ID NO: 34982 - DNA, 20 bp, synthetic construct
  misc_feature 1..20: note = Description of Artificial Sequence: Synthetic oligonucleotide
  misc_feature 1..20: note = Target: FXN; (+) strand; PAM type: YTN; PAM sequence: TTC
  source 1..20: mol_type = other DNA
tgtacacttaacatggttaa

SEQ ID NO: 34983 - DNA, 20 bp, synthetic construct
  misc_feature 1..20: note = Description of Artificial Sequence: Synthetic oligonucleotide
  misc_feature 1..20: note = Target: FXN; (+) strand; PAM type: YTN; PAM sequence: CTG
  source 1..20: mol_type = other DNA
tacacttaacatggttaata

SEQ ID NO: 34984 - DNA, 20 bp, synthetic construct
  misc_feature 1..20: note = Description of Artificial Sequence: Synthetic oligonucleotide
  misc_feature 1..20: note = Target: FXN; (+) strand; PAM type: YTN; PAM sequence: CTT
  source 1..20: mol_type = other DNA
aacatggttaatatggtaaa

SEQ ID NO: 34985 - DNA, 20 bp, synthetic construct
  misc_feature 1..20: note = Description of Artificial Sequence: Synthetic oligonucleotide
  misc_feature 1..20: note = Target: FXN; (+) strand; PAM type: YTN; PAM sequence: TTA
  source 1..20: mol_type = other DNA
acatggttaatatggtaaat

SEQ ID NO: 34986 - DNA, 20 bp, synthetic construct
  misc_feature 1..20: note = Description of Artificial Sequence: Synthetic oligonucleotide
  misc_feature 1..20: note = Target: FXN; (+) strand; PAM type: YTN; PAM sequence: TTA
  source 1..20: mol_type = other DNA
atatggtaaatttagcgtta

SEQ ID NO: 34987 - DNA, 20 bp, synthetic construct
  misc_feature 1..20: note = Description of Artificial Sequence: Synthetic oligonucleotide
  misc_feature 1..20: note = Target: FXN; (+) strand; PAM type: YTN; PAM sequence: TTT
  source 1..20: mol_type = other DNA
agcgttatgtgctttttact

SEQ ID NO: 34988 - DNA, 20 bp, synthetic construct
  misc_feature 1..20: note = Description of Artificial Sequence: Synthetic oligonucleotide
  misc_feature 1..20: note = Target: FXN; (+) strand; PAM type: YTN; PAM sequence: TTA
  source 1..20: mol_type = other DNA
gcgttatgtgctttttacta

SEQ ID NO: 34989 - DNA, 20 bp, synthetic construct
  misc_feature 1..20: note = Description of Artificial Sequence: Synthetic oligonucleotide
  misc_feature 1..20: note = Target: FXN; (+) strand; PAM type: YTN; PAM sequence: TTA
  source 1..20: mol_type = other DNA
tgtgctttttactatagtaa

SEQ ID NO: 34990 - DNA, 20 bp, synthetic construct
  misc_feature 1..20: note = Description of Artificial Sequence: Synthetic oligonucleotide
  misc_feature 1..20: note = Target: FXN; (+) strand; PAM type: YTN; PAM sequence: CTT
  source 1..20: mol_type = other DNA
tttactatagtaaaattaaa

SEQ ID NO: 34991 - DNA, 20 bp, synthetic construct
  misc_feature 1..20: note = Description of Artificial Sequence: Synthetic oligonucleotide
  misc_feature 1..20: note = Target: FXN; (+) strand; PAM type: YTN; PAM sequence: TTT
  source 1..20: mol_type = other DNA
ttactatagtaaaattaaaa

SEQ ID NO: 34992 - DNA, 20 bp, synthetic construct
  misc_feature 1..20: note = Description of Artificial Sequence: Synthetic oligonucleotide
  misc_feature 1..20: note = Target: FXN; (+) strand; PAM type: YTN; PAM sequence: TTT
  source 1..20: mol_type = other DNA
tactatagtaaaattaaaaa

SEQ ID NO: 34993 - DNA, 20 bp, synthetic construct
  misc_feature 1..20: note = Description of Artificial Sequence: Synthetic oligonucleotide
  misc_feature 1..20: note = Target: FXN; (+) strand; PAM type: YTN; PAM sequence: TTT
  source 1..20: mol_type = other DNA
actatagtaaaattaaaaaa

SEQ ID NO: 34994 - DNA, 20 bp, synthetic construct
  misc_feature 1..20: note = Description of Artificial Sequence: Synthetic oligonucleotide
  misc_feature 1..20: note = Target: FXN; (+) strand; PAM type: YTN; PAM sequence: TTA
  source 1..20: mol_type = other DNA
ctatagtaaaattaaaaaaa

SEQ ID NO: 34995 - DNA, 20 bp, synthetic construct
  misc_feature 1..20: note = Description of Artificial Sequence: Synthetic oligonucleotide
  misc_feature 1..20: note = Target: FXN; (+) strand; PAM type: YTN; PAM sequence: CTA
  source 1..20: mol_type = other DNA
tagtaaaattaaaaaaaaaa

SEQ ID NO: 34996 - DNA, 20 bp, synthetic construct
  misc_feature 1..20: note = Description of Artificial Sequence: Synthetic oligonucleotide
  misc_feature 1..20: note = Target: FXN; (+) strand; PAM type: YTN; PAM sequence: TTA
  source 1..20: mol_type = other DNA
aaaaaaaaaaaaatggggcc

SEQ ID NO: 34997 - DNA, 20 bp, synthetic construct
  misc_feature 1..20: note = Description of Artificial Sequence: Synthetic oligonucleotide
  misc_feature 1..20: note = Target: FXN; (+) strand; PAM type: YTN; PAM sequence: CTC
  source 1..20: mol_type = other DNA
acacctgtaacataatccca

SEQ ID NO: 34998 - DNA, 20 bp, synthetic construct
  misc_feature 1..20: note = Description of Artificial Sequence: Synthetic oligonucleotide
  misc_feature 1..20: note = Target: FXN; (+) strand; PAM type: YTN; PAM sequence: CTG
  source 1..20: mol_type = other DNA
taacataatcccagcacttt

SEQ ID NO: 34999 - DNA, 20 bp, synthetic construct
  misc_feature 1..20: note = Description of Artificial Sequence: Synthetic oligonucleotide
  misc_feature 1..20: note = Target: FXN; (+) strand; PAM type: YTN; PAM sequence: CTT
  source 1..20: mol_type = other DNA
tgggaggccgaggtaggagg

SEQ ID NO: 35000 - DNA, 20 bp, synthetic construct
  misc_feature 1..20: note = Description of Artificial Sequence: Synthetic oligonucleotide
  misc_feature 1..20: note = Target: FXN; (+) strand; PAM type: YTN; PAM sequence: TTT
  source 1..20: mol_type = other DNA
gggaggccgaggtaggagga

SEQ ID NO: 35001 - DNA, 20 bp, synthetic construct
  misc_feature 1..20: note = Description of Artificial Sequence: Synthetic oligonucleotide
  misc_feature 1..20: note = Target: FXN; (+) strand; PAM type: YTN; PAM sequence: TTG
  source 1..20: mol_type = other DNA
ggaggccgaggtaggaggat

SEQ ID NO: 35002 - DNA, 20 bp, synthetic construct
  misc_feature 1..20: note = Description of Artificial Sequence: Synthetic oligonucleotide
  misc_feature 1..20: note = Target: FXN; (+) strand; PAM type: YTN; PAM sequence: CTT
  source 1..20: mol_type = other DNA
gaggccagaagtttgaaacc

SEQ ID NO: 35003 - DNA, 20 bp, synthetic construct
  misc_feature 1..20: note = Description of Artificial Sequence: Synthetic oligonucleotide
  misc_feature 1..20: note = Target: FXN; (+) strand; PAM type: YTN; PAM sequence: TTG
  source 1..20: mol_type = other DNA
aggccagaagtttgaaacca

SEQ ID NO: 35004 - DNA, 20 bp, synthetic construct
  misc_feature 1..20: note = Description of Artificial Sequence: Synthetic oligonucleotide
  misc_feature 1..20: note = Target: FXN; (+) strand; PAM type: YTN; PAM sequence: TTT
  source 1..20: mol_type = other DNA
gaaaccagcctggtcaatat

SEQ ID NO: 35005 - DNA, 20 bp, synthetic construct
  misc_feature 1..20: note = Description of Artificial Sequence: Synthetic oligonucleotide
  misc_feature 1..20: note = Target: FXN; (+) strand; PAM type: YTN; PAM sequence: TTG
  source 1..20: mol_type = other DNA
aaaccagcctggtcaatata

SEQ ID NO: 35006 - DNA, 20 bp, synthetic construct
  misc_feature 1..20: note = Description of Artificial Sequence: Synthetic oligonucleotide
  misc_feature 1..20: note = Target: FXN; (+) strand; PAM type: YTN; PAM sequence: CTG
  source 1..20: mol_type = other DNA
gtcaatatagcgagacctca

SEQ ID NO: 35007 - DNA, 20 bp, synthetic construct
  misc_feature 1..20: note = Description of Artificial Sequence: Synthetic oligonucleotide
  misc_feature 1..20: note = Target: FXN; (+) strand; PAM type: YTN; PAM sequence: CTC
  source 1..20: mol_type = other DNA
atctctacaaaagaaaaatg

SEQ ID NO: 35008 - DNA, 20 bp, synthetic construct
  misc_feature 1..20: note = Description of Artificial Sequence: Synthetic oligonucleotide
  misc_feature 1..20: note = Target: FXN; (+) strand; PAM type: YTN; PAM sequence: CTC
  source 1..20: mol_type = other DNA
tacaaaagaaaaatgttaaa

SEQ ID NO: 35009 - DNA, 20 bp, synthetic construct
  misc_feature 1..20: note = Description of Artificial Sequence: Synthetic oligonucleotide
  misc_feature 1..20: note = Target: FXN; (+) strand; PAM type: YTN; PAM sequence: CTA
  source 1..20: mol_type = other DNA
caaaagaaaaatgttaaaat

SEQ ID NO: 35010 - DNA, 20 bp, synthetic construct
  misc_feature 1..20: note = Description of Artificial Sequence: Synthetic oligonucleotide
  misc_feature 1..20: note = Target: FXN; (+) strand; PAM type: YTN; PAM sequence: TTA
  source 1..20: mol_type = other DNA
aaattagacaggtgtggtgt

SEQ ID NO: 35011 - DNA, 20 bp, synthetic construct
  misc_feature 1..20: note = Description of Artificial Sequence: Synthetic oligonucleotide
  misc_feature 1..20: note = Target: FXN; (+) strand; PAM type: YTN; PAM sequence: TTA
  source 1..20: mol_type = other DNA
gacaggtgtggtgtctgtag

SEQ ID NO: 35012 - DNA, 20 bp, synthetic construct
  misc_feature 1..20: note = Description of Artificial Sequence: Synthetic oligonucleotide
  misc_feature 1..20: note = Target: FXN; (+) strand; PAM type: YTN; PAM sequence: CTG
  source 1..20: mol_type = other DNA
tagtcccagctctctggagg

SEQ ID NO: 35013 - DNA, 20 bp, synthetic construct
  misc_feature 1..20: note = Description of Artificial Sequence: Synthetic oligonucleotide
  misc_feature 1..20: note = Target: FXN; (+) strand; PAM type: YTN; PAM sequence: CTC
  source 1..20: mol_type = other DNA
tctggaggcagggactgagt

SEQ ID NO: 35014 - DNA, 20 bp, synthetic construct
  misc_feature 1..20: note = Description of Artificial Sequence: Synthetic oligonucleotide
  misc_feature 1..20: note = Target: FXN; (+) strand; PAM type: YTN; PAM sequence: CTC
  source 1..20: mol_type = other DNA
tggaggcagggactgagtca

SEQ ID NO: 35015 - DNA, 20 bp, synthetic construct
  misc_feature 1..20: note = Description of Artificial Sequence: Synthetic oligonucleotide
  misc_feature 1..20: note = Target: FXN; (+) strand; PAM type: YTN; PAM sequence: CTG
  source 1..20: mol_type = other DNA
gaggcagggactgagtcaga

SEQ ID NO: 35016 - DNA, 20 bp, synthetic construct
  misc_feature 1..20: note = Description of Artificial Sequence: Synthetic oligonucleotide
  misc_feature 1..20: note = Target: FXN; (+) strand; PAM type: YTN; PAM sequence: CTG
  source 1..20: mol_type = other DNA
agtcagaggatcacttgagc

SEQ ID NO: 35017 - DNA, 20 bp, synthetic construct
  misc_feature 1..20: note = Description of Artificial Sequence: Synthetic oligonucleotide
  misc_feature 1..20: note = Target: FXN; (+) strand; PAM type: YTN; PAM sequence: CTT
  source 1..20: mol_type = other DNA
gagcataggggtttgaggct

SEQ ID NO: 35018 - DNA, 20 bp, synthetic construct
  misc_feature 1..20: note = Description of Artificial Sequence: Synthetic oligonucleotide
  misc_feature 1..20: note = Target: FXN; (+) strand; PAM type: YTN; PAM sequence: TTG
  source 1..20: mol_type = other DNA
agcataggggtttgaggctg

SEQ ID NO: 35019 - DNA, 20 bp, synthetic construct
  misc_feature 1..20: note = Description of Artificial Sequence: Synthetic oligonucleotide
  misc_feature 1..20: note = Target: FXN; (+) strand; PAM type: YTN; PAM sequence: TTT
  source 1..20: mol_type = other DNA
gaggctgcagtgagccatga

SEQ ID NO: 35020 - DNA, 20 bp, synthetic construct
  misc_feature 1..20: note = Description of Artificial Sequence: Synthetic oligonucleotide
  misc_feature 1..20: note = Target: FXN; (+) strand; PAM type: YTN; PAM sequence: TTG
  source 1..20: mol_type = other DNA
aggctgcagtgagccatgat

SEQ ID NO: 35021 - DNA, 20 bp, synthetic construct
  misc_feature 1..20: note = Description of Artificial Sequence: Synthetic oligonucleotide
  misc_feature 1..20: note = Target: FXN; (+) strand; PAM type: YTN; PAM sequence: CTG
  source 1..20: mol_type = other DNA
cagtgagccatgatcctgcc

SEQ ID NO: 35022 - DNA, 20 bp, synthetic construct
  misc_feature 1..20: note = Description of Artificial Sequence: Synthetic oligonucleotide
  misc_feature 1..20: note = Target: FXN; (+) strand; PAM type: YTN; PAM sequence: CTG
  source 1..20: mol_type = other DNA
ccactgctgcagcctgagca

SEQ ID NO: 35023 - DNA, 20 bp, synthetic construct
  misc_feature 1..20: note = Description of Artificial Sequence: Synthetic oligonucleotide
  misc_feature 1..20: note = Target: FXN; (+) strand; PAM type: YTN; PAM sequence: CTG
  source 1..20: mol_type = other DNA
ctgcagcctgagcaacagag

SEQ ID NO: 35024 - DNA, 20 bp, synthetic construct
  misc_feature 1..20: note = Description of Artificial Sequence: Synthetic oligonucleotide
  misc_feature 1..20: note = Target: FXN; (+) strand; PAM type: YTN; PAM sequence: CTG
  source 1..20: mol_type = other DNA
cagcctgagcaacagagcaa

SEQ ID NO: 35025 - DNA, 20 bp, synthetic construct
  misc_feature 1..20: note = Description of Artificial Sequence: Synthetic oligonucleotide
  misc_feature 1..20: note = Target: FXN; (+) strand; PAM type: YTN; PAM sequence: CTG
  source 1..20: mol_type = other DNA
agcaacagagcaagaccctg

SEQ ID NO: 35026 - DNA, 20 bp, synthetic construct
  misc_feature 1..20: note = Description of Artificial Sequence: Synthetic oligonucleotide
  misc_feature 1..20: note = Target: FXN; (+) strand; PAM type: YTN; PAM sequence: CTG
  source 1..20: mol_type = other DNA
ttgtaaaaacaaacaaacaa

SEQ ID NO: 35027 - DNA, 20 bp, synthetic construct
  misc_feature 1..20: note = Description of Artificial Sequence: Synthetic oligonucleotide
  misc_feature 1..20: note = Target: FXN; (+) strand; PAM type: YTN; PAM sequence: TTG
  source 1..20: mol_type = other DNA
taaaaacaaacaaacaaaaa

SEQ ID NO: 35028 - DNA, 20 bp, synthetic construct
  misc_feature 1..20: note = Description of Artificial Sequence: Synthetic oligonucleotide
  misc_feature 1..20: note = Target: FXN; (+) strand; PAM type: YTN; PAM sequence: CTG
  source 1..20: mol_type = other DNA
gcagctgatacctgagagtg

SEQ ID NO: 35029 - DNA, 20 bp, synthetic construct
  misc_feature 1..20: note = Description of Artificial Sequence: Synthetic oligonucleotide
  misc_feature 1..20: note = Target: FXN; (+) strand; PAM type: YTN; PAM sequence: CTG
  source 1..20: mol_type = other DNA
atacctgagagtgaatatct

SEQ ID NO: 35030 - DNA, 20 bp, synthetic construct
  misc_feature 1..20: note = Description of Artificial Sequence: Synthetic oligonucleotide
  misc_feature 1..20: note = Target: FXN; (+) strand; PAM type: YTN; PAM sequence: CTG
  source 1..20: mol_type = other DNA
agagtgaatatcttttatcg

SEQ ID NO: 35031 - DNA, 20 bp, synthetic construct
  misc_feature 1..20: note = Description of Artificial Sequence: Synthetic oligonucleotide
  misc_feature 1..20: note = Target: FXN; (+) strand; PAM type: YTN; PAM sequence: CTT
  source 1..20: mol_type = other DNA
ttatcgctggttaatgggat

SEQ ID NO: 35032 - DNA, 20 bp, synthetic construct
  misc_feature 1..20: note = Description of Artificial Sequence: Synthetic oligonucleotide
  misc_feature 1..20: note = Target: FXN; (+) strand; PAM type: YTN; PAM sequence: TTT
  source 1..20: mol_type = other DNA
tatcgctggttaatgggatt

SEQ ID NO: 35033 - DNA, 20 bp, synthetic construct
  misc_feature 1..20: note = Description of Artificial Sequence: Synthetic oligonucleotide
  misc_feature 1..20: note = Target: FXN; (+) strand; PAM type: YTN; PAM sequence: TTT
  source 1..20: mol_type = other DNA
atcgctggttaatgggattg

SEQ ID NO: 35034 - DNA, 20 bp, synthetic construct
  misc_feature 1..20: note = Description of Artificial Sequence: Synthetic oligonucleotide
  misc_feature 1..20: note = Target: FXN; (+) strand; PAM type: YTN; PAM sequence: TTA
  source 1..20: mol_type = other DNA
tcgctggttaatgggattga

SEQ ID NO: 35035 - DNA, 20 bp, synthetic construct
  misc_feature 1..20: note = Description of Artificial Sequence: Synthetic oligonucleotide
  misc_feature 1..20: note = Target: FXN; (+) strand; PAM type: YTN; PAM sequence: CTG
  source 1..20: mol_type = other DNA
gttaatgggattgagagaat

SEQ ID NO: 35036 - DNA, 20 bp, synthetic construct
  misc_feature 1..20: note = Description of Artificial Sequence: Synthetic oligonucleotide
  misc_feature 1..20: note = Target: FXN; (+) strand; PAM type: YTN; PAM sequence: TTA
  source 1..20: mol_type = other DNA
atgggattgagagaatgctt

SEQ ID NO: 35037 - DNA, 20 bp, synthetic construct
  misc_feature 1..20: note = Description of Artificial Sequence: Synthetic oligonucleotide
  misc_feature 1..20: note = Target: FXN; (+) strand; PAM type: YTN; PAM sequence: TTG
  source 1..20: mol_type = other DNA
agagaatgcttcatcttata

SEQ ID NO: 35038 - DNA, 20 bp, synthetic construct
  misc_feature 1..20: note = Description of Artificial Sequence: Synthetic oligonucleotide
  misc_feature 1..20: note = Target: FXN; (+) strand; PAM type: YTN; PAM sequence: CTT
  source 1..20: mol_type = other DNA
catcttatagaaagaacagt

SEQ ID NO: 35039 - DNA, 20 bp, synthetic construct
  misc_feature 1..20: note = Description of Artificial Sequence: Synthetic oligonucleotide
  misc_feature 1..20: note = Target: FXN; (+) strand; PAM type: YTN; PAM sequence: TTC
  source 1..20: mol_type = other DNA
atcttatagaaagaacagtg

SEQ ID NO: 35040 - DNA, 20 bp, synthetic construct
  misc_feature 1..20: note = Description of Artificial Sequence: Synthetic oligonucleotide
  misc_feature 1..20: note = Target: FXN; (+) strand; PAM type: YTN; PAM sequence: CTT
  source 1..20: mol_type = other DNA
atagaaagaacagtgtcttt

SEQ ID NO: 35041 - DNA, 20 bp, synthetic construct
  misc_feature 1..20: note = Description of Artificial Sequence: Synthetic oligonucleotide
  misc_feature 1..20: note = Target: FXN; (+) strand; PAM type: YTN; PAM sequence: TTA
  source 1..20: mol_type = other DNA
tagaaagaacagtgtctttg

SEQ ID NO: 35042 - DNA, 20 bp, synthetic construct
  misc_feature 1..20: note = Description of Artificial Sequence: Synthetic oligonucleotide
  misc_feature 1..20: note = Target: FXN; (+) strand; PAM type: YTN; PAM sequence: CTT
  source 1..20: mol_type = other DNA
tggacccacagagacctgga

SEQ ID NO: 35043 - DNA, 20 bp, synthetic construct
  misc_feature 1..20: note = Description of Artificial Sequence: Synthetic oligonucleotide
  misc_feature 1..20: note = Target: FXN; (+) strand; PAM type: YTN; PAM sequence: TTT
  source 1..20: mol_type = other DNA
ggacccacagagacctggat

SEQ ID NO: 35044 - DNA, 20 bp, synthetic construct
  misc_feature 1..20: note = Description of Artificial Sequence: Synthetic oligonucleotide
  misc_feature 1..20: note = Target: FXN; (+) strand; PAM type: YTN; PAM sequence: TTG
  source 1..20: mol_type = other DNA
gacccacagagacctggatt

SEQ ID NO: 35045 - DNA, 20 bp, synthetic construct
  misc_feature 1..20: note = Description of Artificial Sequence: Synthetic oligonucleotide
  misc_feature 1..20: note = Target: FXN; (+) strand; PAM type: YTN; PAM sequence: CTG
  source 1..20: mol_type = other DNA
gatttaagattagctctgcc

SEQ ID NO: 35046 - DNA, 20 bp, synthetic construct
  misc_feature 1..20: note = Description of Artificial Sequence: Synthetic oligonucleotide
  misc_feature 1..20: note = Target: FXN; (+) strand; PAM type: YTN; PAM sequence: TTT
  source 1..20: mol_type = other DNA
aagattagctctgccaatta

SEQ ID NO: 35047 - DNA, 20 bp, synthetic construct
  misc_feature 1..20: note = Description of Artificial Sequence: Synthetic oligonucleotide
  misc_feature 1..20: note = Target: FXN; (+) strand; PAM type: YTN; PAM sequence: TTA
  source 1..20: mol_type = other DNA
agattagctctgccaattac

SEQ ID NO: 35048 - DNA, 20 bp, synthetic construct
  misc_feature 1..20: note = Description of Artificial Sequence: Synthetic oligonucleotide
  misc_feature 1..20: note = Target: FXN; (+) strand; PAM type: YTN; PAM sequence: TTA
  source 1..20: mol_type = other DNA
gctctgccaattactgagta

SEQ ID NO: 35049 - DNA, 20 bp, synthetic construct
  misc_feature 1..20: note = Description of Artificial Sequence: Synthetic oligonucleotide
  misc_feature 1..20: note = Target: FXN; (+) strand; PAM type: YTN; PAM sequence: CTC
  source 1..20: mol_type = other DNA
tgccaattactgagtactct

SEQ ID NO: 35050 - DNA, 20 bp, synthetic construct
  misc_feature 1..20: note = Description of Artificial Sequence: Synthetic oligonucleotide
  misc_feature 1..20: note = Target: FXN; (+) strand; PAM type: YTN; PAM sequence: CTG
  source 1..20: mol_type = other DNA
ccaattactgagtactcttt

SEQ ID NO: 35051 - DNA, 20 bp, synthetic construct
  misc_feature 1..20: note = Description of Artificial Sequence: Synthetic oligonucleotide
  misc_feature 1..20: note = Target: FXN; (+) strand; PAM type: YTN; PAM sequence: TTA
  source 1..20: mol_type = other DNA
ctgagtactctttactatga

SEQ ID NO: 35052 - DNA, 20 bp, synthetic construct
  misc_feature 1..20: note = Description of Artificial Sequence: Synthetic oligonucleotide
  misc_feature 1..20: note = Target: FXN; (+) strand; PAM type: YTN; PAM sequence: CTG
  source 1..20: mol_type = other DNA
agtactctttactatgaacc

SEQ ID NO: 35053 - DNA, 20 bp, synthetic construct
  misc_feature 1..20: note = Description of Artificial Sequence: Synthetic oligonucleotide
  misc_feature 1..20: note = Target: FXN; (+) strand; PAM type: YTN; PAM sequence: CTC
  source 1..20: mol_type = other DNA
tttactatgaacctctgttt

SEQ ID NO: 35054 - DNA, 20 bp, synthetic construct
  misc_feature 1..20: note = Description of Artificial Sequence: Synthetic oligonucleotide
  misc_feature 1..20: note = Target: FXN; (+) strand; PAM type: YTN; PAM sequence: CTT
  source 1..20: mol_type = other DNA
tactatgaacctctgttttc

SEQ ID NO: 35055 - DNA, 20 bp, synthetic construct
  misc_feature 1..20: note = Description of Artificial Sequence: Synthetic oligonucleotide
  misc_feature 1..20: note = Target: FXN; (+) strand; PAM type: YTN; PAM sequence: TTT
  source 1..20: mol_type = other DNA
actatgaacctctgttttcc

SEQ ID NO: 35056 - DNA, 20 bp, synthetic construct
  misc_feature 1..20: note = Description of Artificial Sequence: Synthetic oligonucleotide
  misc_feature 1..20: note = Target: FXN; (+) strand; PAM type: YTN; PAM sequence: TTA
  source 1..20: mol_type = other DNA
ctatgaacctctgttttcct

SEQ ID NO: 35057 - DNA, 20 bp, synthetic construct
  misc_feature 1..20: note = Description of Artificial Sequence: Synthetic oligonucleotide
  misc_feature 1..20: note = Target: FXN; (+) strand; PAM type: YTN; PAM sequence: CTA
  source 1..20: mol_type = other DNA
tgaacctctgttttcctcat

SEQ ID NO: 35058 - DNA, 20 bp, synthetic construct
  misc_feature 1..20: note = Description of Artificial Sequence: Synthetic oligonucleotide
  misc_feature 1..20: note = Target: FXN; (+) strand; PAM type: YTN; PAM sequence: CTC
  source 1..20: mol_type = other DNA
tgttttcctcatctgtgaaa

SEQ ID NO: 35059 - DNA, 20 bp, synthetic construct
  misc_feature 1..20: note = Description of Artificial Sequence: Synthetic oligonucleotide
  misc_feature 1..20: note = Target: FXN; (+) strand; PAM type: YTN; PAM sequence: CTG
  source 1..20: mol_type = other DNA
ttttcctcatctgtgaaact

SEQ ID NO: 35060 - DNA, 20 bp, synthetic construct
  misc_feature 1..20: note = Description of Artificial Sequence: Synthetic oligonucleotide
  misc_feature 1..20: note = Target: FXN; (+) strand; PAM type: YTN; PAM sequence: TTT
  source 1..20: mol_type = other DNA
tcctcatctgtgaaactgga

SEQ ID NO: 35061 - DNA, 20 bp, synthetic construct
  misc_feature 1..20: note = Description of Artificial Sequence: Synthetic oligonucleotide
  misc_feature 1..20: note = Target: FXN; (+) strand; PAM type: YTN; PAM sequence: TTT
  source 1..20: mol_type = other DNA
cctcatctgtgaaactggaa

SEQ ID NO: 35062 - DNA, 20 bp, synthetic construct
  misc_feature 1..20: note = Description of Artificial Sequence: Synthetic oligonucleotide
  misc_feature 1..20: note = Target: FXN; (+) strand; PAM type: YTN; PAM sequence: TTC
  source 1..20: mol_type = other DNA
ctcatctgtgaaactggaat

SEQ ID NO: 35063 - DNA, 20 bp, synthetic construct
  misc_feature 1..20: note = Description of Artificial Sequence: Synthetic oligonucleotide
  misc_feature 1..20: note = Target: FXN; (+) strand; PAM type: YTN; PAM sequence: CTC
  source 1..20: mol_type = other DNA
atctgtgaaactggaataat

SEQ ID NO: 35064 - DNA, 20 bp, synthetic construct
  misc_feature 1..20: note = Description of Artificial Sequence: Synthetic oligonucleotide
  misc_feature 1..20: note = Target: FXN; (+) strand; PAM type: YTN; PAM sequence: CTG
  source 1..20: mol_type = other DNA
tgaaactggaataatgaatc

SEQ ID NO: 35065 - DNA, 20 bp, synthetic construct
  misc_feature 1..20: note = Description of Artificial Sequence: Synthetic oligonucleotide
  misc_feature 1..20: note = Target: FXN; (+) strand; PAM type: YTN; PAM sequence: CTG
  source 1..20: mol_type = other DNA
gaataatgaatcctaccgcc

SEQ ID NO: 35066 - DNA, 20 bp, synthetic construct
  misc_feature 1..20: note = Description of Artificial Sequence: Synthetic oligonucleotide
  misc_feature 1..20: note = Target: FXN; (+) strand; PAM type: YTN; PAM sequence: CTA
  source 1..20: mol_type = other DNA
ccgccaacaattgtagtcaa

SEQ ID NO: 35067 - DNA, 20 bp, synthetic construct
  misc_feature 1..20: note = Description of Artificial Sequence: Synthetic oligonucleotide
  misc_feature 1..20: note = Target: FXN; (+) strand; PAM type: YTN; PAM sequence: TTG
  source 1..20: mol_type = other DNA
tagtcaagttggaaacaatt

SEQ ID NO: 35068 - DNA, 20 bp, synthetic construct
  misc_feature 1..20: note = Description of Artificial Sequence: Synthetic oligonucleotide
  misc_feature 1..20: note = Target: FXN; (+) strand; PAM type: YTN; PAM sequence: TTG
  source 1..20: mol_type = other DNA
gaaacaatttacacaaagtg

SEQ ID NO: 35069 - DNA, 20 bp, synthetic construct
  misc_feature 1..20: note = Description of Artificial Sequence: Synthetic oligonucleotide
  misc_feature 1..20: note = Target: FXN; (+) strand; PAM type: YTN; PAM sequence: TTT
  source 1..20: mol_type = other DNA
acacaaagtgccaaacacca

SEQ ID NO: 35070 - DNA, 20 bp, synthetic construct
  misc_feature 1..20: note = Description of Artificial Sequence: Synthetic oligonucleotide
  misc_feature 1..20: note = Target: FXN; (+) strand; PAM type: YTN; PAM sequence: TTA
  source 1..20: mol_type = other DNA
cacaaagtgccaaacaccaa

SEQ ID NO: 35071 - DNA, 20 bp, synthetic construct
  misc_feature 1..20: note = Description of Artificial Sequence: Synthetic oligonucleotide
  misc_feature 1..20: note = Target: FXN; (+) strand; PAM type: YTN; PAM sequence: CTG
  source 1..20: mol_type = other DNA
gcacagtaggaaccgagtaa

SEQ ID NO: 35072 - DNA, 20 bp, synthetic construct
  misc_feature 1..20: note = Description of Artificial Sequence: Synthetic oligonucleotide
  misc_feature 1..20: note = Target: FXN; (+) strand; PAM type: YTN; PAM sequence: TTA
  source 1..20: mol_type = other DNA
atatttttatcagtgtctgc

SEQ ID NO: 35073 - DNA, 20 bp, synthetic construct
  misc_feature 1..20: note = Description of Artificial Sequence: Synthetic oligonucleotide
  misc_feature 1..20: note = Target: FXN; (+) strand; PAM type: YTN; PAM sequence: TTT
  source 1..20: mol_type = other DNA
ttatcagtgtctgcattgct

SEQ ID NO: 35074 - DNA, 20 bp, synthetic construct
  misc_feature 1..20: note = Description of Artificial Sequence: Synthetic oligonucleotide
  misc_feature 1..20: note = Target: FXN; (+) strand; PAM type: YTN; PAM sequence: TTT
  source 1..20: mol_type = other DNA
tatcagtgtctgcattgctg

SEQ ID NO: 35075 - DNA, 20 bp, synthetic construct
  misc_feature 1..20: note = Description of Artificial Sequence: Synthetic oligonucleotide
  misc_feature 1..20: note = Target: FXN; (+) strand; PAM type: YTN; PAM sequence: TTT
  source 1..20: mol_type = other DNA
atcagtgtctgcattgctga

SEQ ID NO: 35076 - DNA, 20 bp, synthetic construct
  misc_feature 1..20: note = Description of Artificial Sequence: Synthetic oligonucleotide
  misc_feature 1..20: note = Target: FXN; (+) strand; PAM type: YTN; PAM sequence: TTA
  source 1..20: mol_type = other DNA
tcagtgtctgcattgctgac

SEQ ID NO: 35077 - DNA, 20 bp, synthetic construct
  misc_feature 1..20: note = Description of Artificial Sequence: Synthetic oligonucleotide
  misc_feature 1..20: note = Target: FXN; (+) strand; PAM type: YTN; PAM sequence: CTG
  source 1..20: mol_type = other DNA
cattgctgacgtctccatca

SEQ ID NO: 35078 - DNA, 20 bp, synthetic construct
  misc_feature 1..20: note = Description of Artificial Sequence: Synthetic oligonucleotide
  misc_feature 1..20: note = Target: FXN; (+) strand; PAM type: YTN; PAM sequence: TTG
  source 1..20: mol_type = other DNA
ctgacgtctccatcatttct

SEQ ID NO: 35079 - DNA, 20 bp, synthetic construct
  misc_feature 1..20: note = Description of Artificial Sequence: Synthetic oligonucleotide
  misc_feature 1..20: note = Target: FXN; (+) strand; PAM type: YTN; PAM sequence: CTG
  source 1..20: mol_type = other DNA
acgtctccatcatttctata

SEQ ID NO: 35080 - DNA, 20 bp, synthetic construct
  misc_feature 1..20: note = Description of Artificial Sequence: Synthetic oligonucleotide
  misc_feature 1..20: note = Target: FXN; (+) strand; PAM type: YTN; PAM sequence: CTC
  source 1..20: mol_type = other DNA
catcatttctatacatttgt

SEQ ID NO: 35081 - DNA, 20 bp, synthetic construct
  misc_feature 1..20: note = Description of Artificial Sequence: Synthetic oligonucleotide
  misc_feature 1..20: note = Target: FXN; (+) strand; PAM type: YTN; PAM sequence: TTT
  source 1..20: mol_type = other DNA
ctatacatttgtttttgaat

SEQ ID NO: 35082 - DNA, 20 bp, synthetic construct
  misc_feature 1..20: note = Description of Artificial Sequence: Synthetic oligonucleotide
  misc_feature 1..20: note = Target: FXN; (+) strand; PAM type: YTN; PAM sequence: TTC
  source 1..20: mol_type = other DNA
tatacatttgtttttgaatc

SEQ ID NO: 35083 - DNA, 20 bp, synthetic construct
  misc_feature 1..20: note = Description of Artificial Sequence: Synthetic oligonucleotide
  misc_feature 1..20: note = Target: FXN; (+) strand; PAM type: YTN; PAM sequence: CTA
  source 1..20: mol_type = other DNA
tacatttgtttttgaatcag

SEQ ID NO: 35084 - DNA, 20 bp, synthetic construct
  misc_feature 1..20: note = Description of Artificial Sequence: Synthetic oligonucleotide
  misc_feature 1..20: note = Target: FXN; (+) strand; PAM type: YTN; PAM sequence: TTT
  source 1..20: mol_type = other DNA
gtttttgaatcagaaaaaga

SEQ ID NO: 35085 - DNA, 20 bp, synthetic construct
  misc_feature 1..20: note = Description of Artificial Sequence: Synthetic oligonucleotide
  misc_feature 1..20: note = Target: FXN; (+) strand; PAM type: YTN; PAM sequence: TTG
  source 1..20: mol_type = other DNA
tttttgaatcagaaaaagat

SEQ ID NO: 35086 - DNA, 20 bp, synthetic construct
  misc_feature 1..20: note = Description of Artificial Sequence: Synthetic oligonucleotide
  misc_feature 1..20: note = Target: FXN; (+) strand; PAM type: YTN; PAM sequence: TTT
  source 1..20: mol_type = other DNA
ttgaatcagaaaaagatgtt

SEQ ID NO: 35087 - DNA, 20 bp, synthetic construct
  misc_feature 1..20: note = Description of Artificial Sequence: Synthetic oligonucleotide
  misc_feature 1..20: note = Target: FXN; (+) strand; PAM type: YTN; PAM sequence: TTT
  source 1..20: mol_type = other DNA
tgaatcagaaaaagatgtta

SEQ ID NO: 35088 - DNA, 20 bp, synthetic construct
  misc_feature 1..20: note = Description of Artificial Sequence: Synthetic oligonucleotide
  misc_feature 1..20: note = Target: FXN; (+) strand; PAM type: YTN; PAM sequence: TTT
  source 1..20: mol_type = other DNA
gaatcagaaaaagatgttat

SEQ ID NO: 35089 - DNA, 20 bp, synthetic construct
  misc_feature 1..20: note = Description of Artificial Sequence: Synthetic oligonucleotide
  misc_feature 1..20: note = Target: FXN; (+) strand; PAM type: YTN; PAM sequence: TTG
  source 1..20: mol_type = other DNA
aatcagaaaaagatgttatt

SEQ ID NO: 35090 - DNA, 20 bp, synthetic construct
  misc_feature 1..20: note = Description of Artificial Sequence: Synthetic oligonucleotide
  misc_feature 1..20: note = Target: FXN; (+) strand; PAM type: YTN; PAM sequence: TTA
  source 1..20: mol_type = other DNA
ttttaaaaaaataacccagt

SEQ ID NO: 35091 - DNA, 20 bp, synthetic construct
  misc_feature 1..20: note = Description of Artificial Sequence: Synthetic oligonucleotide
  misc_feature 1..20: note = Target: FXN; (+) strand; PAM type: YTN; PAM sequence: TTT
  source 1..20: mol_type = other DNA
taaaaaaataacccagtagt

SEQ ID NO: 35092 - DNA, 20 bp, synthetic construct
  misc_feature 1..20: note = Description of Artificial Sequence: Synthetic oligonucleotide
  misc_feature 1..20: note = Target: FXN; (+) strand; PAM type: YTN; PAM sequence: TTT
  source 1..20: mol_type = other DNA
aaaaaaataacccagtagtg

SEQ ID NO: 35093 - DNA, 20 bp, synthetic construct
  misc_feature 1..20: note = Description of Artificial Sequence: Synthetic oligonucleotide
  misc_feature 1..20: note = Target: FXN; (+) strand; PAM type: YTN; PAM sequence: TTA
  source 1..20: mol_type = other DNA
aaaaaataacccagtagtgc

SEQ ID NO: 35094 - DNA, 20 bp, synthetic construct
  misc_feature 1..20: note = Description of Artificial Sequence: Synthetic oligonucleotide
  misc_feature 1..20: note = Target: FXN; (+) strand; PAM type: YTN; PAM sequence: CTT
  source 1..20: mol_type = other DNA
gtcccattcctatcagttat

SEQ ID NO: 35095 - DNA, 20 bp, synthetic construct
  misc_feature 1..20: note = Description of Artificial Sequence: Synthetic oligonucleotide
  misc_feature 1..20: note = Target: FXN; (+) strand; PAM type: YTN; PAM sequence: TTG
  source 1..20: mol_type = other DNA
tcccattcctatcagttata

SEQ ID NO: 35096 - DNA, 20 bp, synthetic construct
  misc_feature 1..20: note = Description of Artificial Sequence: Synthetic oligonucleotide
  misc_feature 1..20: note = Target: FXN; (+) strand; PAM type: YTN; PAM sequence: TTC
  source 1..20: mol_type = other DNA
ctatcagttatattattatt

SEQ ID NO: 35097 - DNA, 20 bp, synthetic construct
  misc_feature 1..20: note = Description of Artificial Sequence: Synthetic oligonucleotide
  misc_feature 1..20: note = Target: FXN; (+) strand; PAM type: YTN; PAM sequence: CTA
  source 1..20: mol_type = other DNA
tcagttatattattattgtt

SEQ ID NO: 35098 - DNA, 20 bp, synthetic construct
  misc_feature 1..20: note = Description of Artificial Sequence: Synthetic oligonucleotide
  misc_feature 1..20: note = Target: FXN; (+) strand; PAM type: YTN; PAM sequence: TTA
  source 1..20: mol_type = other DNA
tattattattgttactaccc

SEQ ID NO: 35099 - DNA, 20 bp, synthetic construct
  misc_feature 1..20: note = Description of Artificial Sequence: Synthetic oligonucleotide
  misc_feature 1..20: note = Target: FXN; (+) strand; PAM type: YTN; PAM sequence: TTA
  source 1..20: mol_type = other DNA
ttattgttactaccctctgg

SEQ ID NO: 35100 - DNA, 20 bp, synthetic construct
  misc_feature 1..20: note = Description of Artificial Sequence: Synthetic oligonucleotide
  misc_feature 1..20: note = Target: FXN; (+) strand; PAM type: YTN; PAM sequence: TTA
  source 1..20: mol_type = other DNA
ttgttactaccctctggaat

SEQ ID NO: 35101 - DNA, 20 bp, synthetic construct
  misc_feature 1..20: note = Description of Artificial Sequence: Synthetic oligonucleotide
  misc_feature 1..20: note = Target: FXN; (+) strand; PAM type: YTN; PAM sequence: TTG
  source 1..20: mol_type = other DNA
ttactaccctctggaatttc

SEQ ID NO: 35102 - DNA, 20 bp, synthetic construct
  misc_feature 1..20: note = Description of Artificial Sequence: Synthetic oligonucleotide
  misc_feature 1..20: note = Target: FXN; (+) strand; PAM type: YTN; PAM sequence: TTA
  source 1..20: mol_type = other DNA
ctaccctctggaatttcaat

SEQ ID NO: 35103 - DNA, 20 bp, synthetic construct
  misc_feature 1..20: note = Description of Artificial Sequence: Synthetic oligonucleotide
  misc_feature 1..20: note = Target: FXN; (+) strand; PAM type: YTN; PAM sequence: CTA
  source 1..20: mol_type = other DNA
ccctctggaatttcaataac

SEQ ID NO: 35104 - DNA, 20 bp, synthetic construct
  misc_feature 1..20: note = Description of Artificial Sequence: Synthetic oligonucleotide
  misc_feature 1..20: note = Target: FXN; (+) strand; PAM type: YTN; PAM sequence: CTC
  source 1..20: mol_type = other DNA
tggaatttcaataactcttt

SEQ ID NO: 35105 - DNA, 20 bp, synthetic construct
  misc_feature 1..20: note = Description of Artificial Sequence: Synthetic oligonucleotide
  misc_feature 1..20: note = Target: FXN; (+) strand; PAM type: YTN; PAM sequence: CTG
  source 1..20: mol_type = other DNA
gaatttcaataactctttgt

SEQ ID NO: 35106 - DNA, 20 bp, synthetic construct
  misc_feature 1..20: note = Description of Artificial Sequence: Synthetic oligonucleotide
  misc_feature 1..20: note = Target: FXN; (+) strand; PAM type: YTN; PAM sequence: TTT
  source 1..20: mol_type = other DNA
caataactctttgttttttg

SEQ ID NO: 35107 - DNA, 20 bp, synthetic construct
  misc_feature 1..20: note = Description of Artificial Sequence: Synthetic oligonucleotide
  misc_feature 1..20: note = Target: FXN; (+) strand; PAM type: YTN; PAM sequence: TTC
  source 1..20: mol_type = other DNA
aataactctttgttttttgg

SEQ ID NO: 35108 - DNA, 20 bp, synthetic construct
  misc_feature 1..20: note = Description of Artificial Sequence: Synthetic oligonucleotide
  misc_feature 1..20: note = Target: FXN; (+) strand; PAM type: YTN; PAM sequence: CTC
  source 1..20: mol_type = other DNA
tttgttttttgggttttttg

SEQ ID NO: 35109 - DNA, 20 bp, synthetic construct
  misc_feature 1..20: note = Description of Artificial Sequence: Synthetic oligonucleotide
  misc_feature 1..20: note = Target: FXN; (+) strand; PAM type: YTN; PAM sequence: CTT
  source 1..20: mol_type = other DNA
tgttttttgggttttttgtt

SEQ ID NO: 35110 - DNA, 20 bp, synthetic construct
  misc_feature 1..20: note = Description of Artificial Sequence: Synthetic oligonucleotide
  misc_feature 1..20: note = Target: FXN; (+) strand; PAM type: YTN; PAM sequence: TTT
  source 1..20: mol_type = other DNA
gttttttgggttttttgttt

SEQ ID NO: 35111 - DNA, 20 bp, synthetic construct
  misc_feature 1..20: note = Description of Artificial Sequence: Synthetic oligonucleotide
  misc_feature 1..20: note = Target: FXN; (+) strand; PAM type: YTN; PAM sequence: TTG
  source 1..20: mol_type = other DNA
ttttttgggttttttgtttt

SEQ ID NO: 35112 - DNA, 20 bp, synthetic construct
  misc_feature 1..20: note = Description of Artificial Sequence: Synthetic oligonucleotide
  misc_feature 1..20: note = Target: FXN; (+) strand; PAM type: YTN; PAM sequence: TTT
  source 1..20: mol_type = other DNA
tttgggttttttgttttgtt

SEQ ID NO: 35113 - DNA, 20 bp, synthetic construct
  misc_feature 1..20: note = Description of Artificial Sequence: Synthetic oligonucleotide
  misc_feature 1..20: note = Target: FXN; (+) strand; PAM type: YTN; PAM sequence: TTT
  source 1..20: mol_type = other DNA
ttgggttttttgttttgttt

SEQ ID NO: 35114 - DNA, 20 bp, synthetic construct
  misc_feature 1..20: note = Description of Artificial Sequence: Synthetic oligonucleotide
  misc_feature 1..20: note = Target: FXN; (+) strand; PAM type: YTN; PAM sequence: TTT
  source 1..20: mol_type = other DNA
tgggttttttgttttgtttt

SEQ ID NO: 35115 - DNA, 20 bp, synthetic construct
  misc_feature 1..20: note = Description of Artificial Sequence: Synthetic oligonucleotide
  misc_feature 1..20: note = Target: FXN; (+) strand; PAM type: YTN; PAM sequence: TTT
  source 1..20: mol_type = other DNA
gggttttttgttttgttttg

SEQ ID NO: 35116 - DNA, 20 bp, synthetic construct
  misc_feature 1..20: note = Description of Artificial Sequence: Synthetic oligonucleotide
  misc_feature 1..20: note = Target: FXN; (+) strand; PAM type: YTN; PAM sequence: TTG
  source 1..20: mol_type = other DNA
ggttttttgttttgttttgc

SEQ ID NO: 35117 - DNA, 20 bp, synthetic construct
  misc_feature 1..20: note = Description of Artificial Sequence: Synthetic oligonucleotide
  misc_feature 1..20: note = Target: FXN; (+) strand; PAM type: YTN; PAM sequence: TTT
  source 1..20: mol_type = other DNA
tttgttttgttttgctttgc

SEQ ID NO: 35118 - DNA, 20 bp, synthetic construct
  misc_feature 1..20: note = Description of Artificial Sequence: Synthetic oligonucleotide
  misc_feature 1..20: note = Target: FXN; (+) strand; PAM type: YTN; PAM sequence: TTT
  source 1..20: mol_type = other DNA
ttgttttgttttgctttgct

SEQ ID NO: 35119 - DNA, 20 bp, synthetic construct
  misc_feature 1..20: note = Description of Artificial Sequence: Synthetic oligonucleotide
  misc_feature 1..20: note = Target: FXN; (+) strand; PAM type: YTN; PAM sequence: TTT
  source 1..20: mol_type = other DNA
tgttttgttttgctttgctt

SEQ ID NO: 35120 - DNA, 20 bp, synthetic construct
  misc_feature 1..20: note = Description of Artificial Sequence: Synthetic oligonucleotide
  misc_feature 1..20: note = Target: FXN; (+) strand; PAM type: YTN; PAM sequence: TTT
  source 1..20: mol_type = other DNA
gttttgttttgctttgcttt

SEQ ID NO: 35121 - DNA, 20 bp, synthetic construct
  misc_feature 1..20: note = Description of Artificial Sequence: Synthetic oligonucleotide
  misc_feature 1..20: note = Target: FXN; (+) strand; PAM type: YTN; PAM sequence: TTG
  source 1..20: mol_type = other DNA
ttttgttttgctttgctttt

SEQ ID NO: 35122 - DNA, 20 bp, synthetic construct
  misc_feature 1..20: note = Description of Artificial Sequence: Synthetic oligonucleotide
  misc_feature 1..20: note = Target: FXN; (+) strand; PAM type: YTN; PAM sequence: TTT
  source 1..20: mol_type = other DNA
tgttttgctttgcttttgag

SEQ ID NO: 35123 - DNA, 20 bp, synthetic construct
  misc_feature 1..20: note = Description of Artificial Sequence: Synthetic oligonucleotide
  misc_feature 1..20: note = Target: FXN; (+) strand; PAM type: YTN; PAM sequence: TTT
  source 1..20: mol_type = other DNA
gttttgctttgcttttgaga

SEQ ID NO: 35124 - DNA, 20 bp, synthetic construct
  misc_feature 1..20: note = Description of Artificial Sequence: Synthetic oligonucleotide
  misc_feature 1..20: note = Target: FXN; (+) strand; PAM type: YTN; PAM sequence: TTG
  source 1..20: mol_type = other DNA
ttttgctttgcttttgagac

SEQ ID NO: 35125 - DNA, 20 bp, synthetic construct
  misc_feature 1..20: note = Description of Artificial Sequence: Synthetic oligonucleotide
  misc_feature 1..20: note = Target: FXN; (+) strand; PAM type: YTN; PAM sequence: TTT
  source 1..20: mol_type = other DNA
tgctttgcttttgagacagg

SEQ ID NO: 35126 - DNA, 20 bp, synthetic construct
  misc_feature 1..20: note = Description of Artificial Sequence: Synthetic oligonucleotide
  misc_feature 1..20: note = Target: FXN; (+) strand; PAM type: YTN; PAM sequence: TTT
  source 1..20: mol_type = other DNA
gctttgcttttgagacagga

SEQ ID NO: 35127 - DNA, 20 bp, synthetic construct
  misc_feature 1..20: note = Description of Artificial Sequence: Synthetic oligonucleotide
  misc_feature 1..20: note = Target: FXN; (+) strand; PAM type: YTN; PAM sequence: TTG
  source 1..20: mol_type = other DNA
ctttgcttttgagacaggat

SEQ ID NO: 35128 - DNA, 20 bp, synthetic construct
  misc_feature 1..20: note = Description of Artificial Sequence: Synthetic oligonucleotide
  misc_feature 1..20: note = Target: FXN; (+) strand; PAM type: YTN; PAM sequence: CTT
  source 1..20: mol_type = other DNA
tgcttttgagacaggatctc

SEQ ID NO: 35129 - DNA, 20 bp, synthetic construct
  misc_feature 1..20: note = Description of Artificial Sequence: Synthetic oligonucleotide
  misc_feature 1..20: note = Target: FXN; (+) strand; PAM type: YTN; PAM sequence: TTT
  source 1..20: mol_type = other DNA
gcttttgagacaggatctct

SEQ ID NO: 35130 - DNA, 20 bp, synthetic construct
  misc_feature 1..20: note = Description of Artificial Sequence: Synthetic oligonucleotide
  misc_feature 1..20: note = Target: FXN; (+) strand; PAM type: YTN; PAM sequence: TTG
  source 1..20: mol_type = other DNA
cttttgagacaggatctctg

SEQ ID NO: 35131 - DNA, 20 bp, synthetic construct
  misc_feature 1..20: note = Description of Artificial Sequence: Synthetic oligonucleotide
  misc_feature 1..20: note = Target: FXN; (+) strand; PAM type: YTN; PAM sequence: CTT
  source 1..20: mol_type = other DNA
ttgagacaggatctctgtcg

SEQ ID NO: 35132 - DNA, 20 bp, synthetic construct
  misc_feature 1..20: note = Description of Artificial Sequence: Synthetic oligonucleotide
  misc_feature 1..20: note = Target: FXN; (+) strand; PAM type: YTN; PAM sequence: TTT
  source 1..20: mol_type = other DNA
tgagacaggatctctgtcgc

SEQ ID NO: 35133 - DNA, 20 bp, synthetic construct
  misc_feature 1..20: note = Description of Artificial Sequence: Synthetic oligonucleotide
  misc_feature 1..20: note = Target: FXN; (+) strand; PAM type: YTN; PAM sequence: TTT
  source 1..20: mol_type = other DNA
gagacaggatctctgtcgcc

SEQ ID NO: 35134 - DNA, 20 bp, synthetic construct
  misc_feature 1..20: note = Description of Artificial Sequence: Synthetic oligonucleotide
  misc_feature 1..20: note = Target: FXN; (+) strand; PAM type: YTN; PAM sequence: TTG
  source 1..20: mol_type = other DNA
agacaggatctctgtcgccc

SEQ ID NO: 35135 - DNA, 20 bp, synthetic construct
  misc_feature 1..20: note = Description of Artificial Sequence: Synthetic oligonucleotide
  misc_feature 1..20: note = Target: FXN; (+) strand; PAM type: YTN; PAM sequence: CTC
  source 1..20: mol_type = other DNA
tgtcgcccagtctggtgtgt

SEQ ID NO: 35136 - DNA, 20 bp, synthetic construct
  misc_feature 1..20: note = Description of Artificial Sequence: Synthetic oligonucleotide
  misc_feature 1..20: note = Target: FXN; (+) strand; PAM type: YTN; PAM sequence: CTG
  source 1..20: mol_type = other DNA
tcgcccagtctggtgtgtag

SEQ ID NO: 35137 - DNA, 20 bp, synthetic construct
  misc_feature 1..20: note = Description of Artificial Sequence: Synthetic oligonucleotide
  misc_feature 1..20: note = Target: FXN; (+) strand; PAM type: YTN; PAM sequence: CTG
  source 1..20: mol_type = other DNA
gtgtgtagtggtgtgatctc

SEQ ID NO: 35138 - DNA, 20 bp, synthetic construct
  misc_feature 1..20: note = Description of Artificial Sequence: Synthetic oligonucleotide
  misc_feature 1..20: note = Target: FXN; (+) strand; PAM type: YTN; PAM sequence: CTC
  source 1..20: mol_type = other DNA
agctcactgcagcctcaacc

SEQ ID NO: 35139 - DNA, 20 bp, synthetic construct
  misc_feature 1..20: note = Description of Artificial Sequence: Synthetic oligonucleotide
  misc_feature 1..20: note = Target: FXN; (+) strand; PAM type: YTN; PAM sequence: CTC
  source 1..20: mol_type = other DNA
actgcagcctcaacctcctg

SEQ ID NO: 35140 - DNA, 20 bp, synthetic construct
  misc_feature 1..20: note = Description of Artificial Sequence: Synthetic oligonucleotide
  misc_feature 1..20: note = Target: FXN; (+) strand; PAM type: YTN; PAM sequence: CTG
  source 1..20: mol_type = other DNA
cagcctcaacctcctgggct

SEQ ID NO: 35141 - DNA, 20 bp, synthetic construct
  misc_feature 1..20: note = Description of Artificial Sequence: Synthetic oligonucleotide
  misc_feature 1..20: note = Target: FXN; (+) strand; PAM type: YTN; PAM sequence: CTC
  source 1..20: mol_type = other DNA
aacctcctgggctcaggtga

SEQ ID NO: 35142 - DNA, 20 bp, synthetic construct
  misc_feature 1..20: note = Description of Artificial Sequence: Synthetic oligonucleotide
  misc_feature 1..20: note = Target: FXN; (+) strand; PAM type: YTN; PAM sequence: CTC
  source 1..20: mol_type = other DNA
ctgggctcaggtgatcctcc

SEQ ID NO: 35143 - DNA, 20 bp, synthetic construct
  misc_feature 1..20: note = Description of Artificial Sequence: Synthetic oligonucleotide
  misc_feature 1..20: note = Target: FXN; (+) strand; PAM type: YTN; PAM sequence: CTG
  source 1..20: mol_type = other DNA
ggctcaggtgatcctcccac

SEQ ID NO: 35144 - DNA, 20 bp, synthetic construct
  misc_feature 1..20: note = Description of Artificial Sequence: Synthetic oligonucleotide
  misc_feature 1..20: note = Target: FXN; (+) strand; PAM type: YTN; PAM sequence: CTC
  source 1..20: mol_type = other DNA
aggtgatcctcccacttcag

SEQ ID NO: 35145 - DNA, 20 bp, synthetic construct
  misc_feature 1..20: note = Description of Artificial Sequence: Synthetic oligonucleotide
  misc_feature 1..20: note = Target: FXN; (+) strand; PAM type: YTN; PAM sequence: CTC
  source 1..20: mol_type = other DNA
ccacttcagcctcccaagta

SEQ ID NO: 35146 - DNA, 20 bp, synthetic construct
  misc_feature 1..20: note = Description of Artificial Sequence: Synthetic oligonucleotide
  misc_feature 1..20: note = Target: FXN; (+) strand; PAM type: YTN; PAM sequence: CTT
  source 1..20: mol_type = other DNA
cagcctcccaagtagctggg

SEQ ID NO: 35147 - DNA, 20 bp, synthetic construct
  misc_feature 1..20: note = Description of Artificial Sequence: Synthetic oligonucleotide
  misc_feature 1..20: note = Target: FXN; (+) strand; PAM type: YTN; PAM sequence: TTC
  source 1..20: mol_type = other DNA
agcctcccaagtagctggga

SEQ ID NO: 35148 - DNA, 20 bp, synthetic construct
  misc_feature 1..20: note = Description of Artificial Sequence: Synthetic oligonucleotide
  misc_feature 1..20: note = Target: FXN; (+) strand; PAM type: YTN; PAM sequence: CTC
  source 1..20: mol_type = other DNA
ccaagtagctgggaccacag

SEQ ID NO: 35149 - DNA, 20 bp, synthetic construct
  misc_feature 1..20: note = Description of Artificial Sequence: Synthetic oligonucleotide
  misc_feature 1..20: note = Target: FXN; (+) strand; PAM type: YTN; PAM sequence: CTG
  source 1..20: mol_type = other DNA
ggaccacaggcgcatgccac

SEQ ID NO: 35150 - DNA, 20 bp, synthetic construct
  misc_feature 1..20: note = Description of Artificial Sequence: Synthetic oligonucleotide
  misc_feature 1..20: note = Target: FXN; (+) strand; PAM type: YTN; PAM sequence: CTT
  source 1..20: mol_type = other DNA
ggctaatttttgcattttta

SEQ ID NO: 35151 - DNA, 20 bp, synthetic construct
  misc_feature 1..20: note = Description of Artificial Sequence: Synthetic oligonucleotide
  misc_feature 1..20: note = Target: FXN; (+) strand; PAM type: YTN; PAM sequence: TTG
  source 1..20: mol_type = other DNA
gctaatttttgcatttttag

SEQ ID NO: 35152 - DNA, 20 bp, synthetic construct
  misc_feature 1..20: note = Description of Artificial Sequence: Synthetic oligonucleotide
  misc_feature 1..20: note = Target: FXN; (+) strand; PAM type: YTN; PAM sequence: CTA
  source 1..20: mol_type = other DNA
atttttgcatttttagtaga

SEQ ID NO: 35153 - DNA, 20 bp, synthetic construct
  misc_feature 1..20: note = Description of Artificial Sequence: Synthetic oligonucleotide
  misc_feature 1..20: note = Target: FXN; (+) strand; PAM type: YTN; PAM sequence: TTT
  source 1..20: mol_type = other DNA
ttgcatttttagtagagaca

SEQ ID NO: 35154 - DNA, 20 bp, synthetic construct
  misc_feature 1..20: note = Description of Artificial Sequence: Synthetic oligonucleotide
  misc_feature 1..20: note = Target: FXN; (+) strand; PAM type: YTN; PAM sequence: TTT
  source 1..20: mol_type = other DNA
tgcatttttagtagagacag

SEQ ID NO: 35155 - DNA, 20 bp, synthetic construct
  misc_feature 1..20: note = Description of Artificial Sequence: Synthetic oligonucleotide
  misc_feature 1..20: note = Target: FXN; (+) strand; PAM type: YTN; PAM sequence: TTT
  source 1..20: mol_type = other DNA
gcatttttagtagagacagg

SEQ ID NO: 35156 - DNA, 20 bp, synthetic construct
  misc_feature 1..20: note = Description of Artificial Sequence: Synthetic oligonucleotide
  misc_feature 1..20: note = Target: FXN; (+) strand; PAM type: YTN; PAM sequence: TTG
  source 1..20: mol_type = other DNA
catttttagtagagacaggg

SEQ ID NO: 35157 - DNA, 20 bp, synthetic construct
  misc_feature 1..20: note = Description of Artificial Sequence: Synthetic oligonucleotide
  misc_feature 1..20: note = Target: FXN; (+) strand; PAM type: YTN; PAM sequence: TTT
  source 1..20: mol_type = other DNA
ttagtagagacagggttttg

SEQ ID NO: 35158 - DNA, 20 bp, synthetic construct
  misc_feature 1..20: note = Description of Artificial Sequence: Synthetic oligonucleotide
  misc_feature 1..20: note = Target: FXN; (+) strand; PAM type: YTN; PAM sequence: TTT
  source 1..20: mol_type = other DNA
tagtagagacagggttttgc

SEQ ID NO: 35159 - DNA, 20 bp, synthetic construct
  misc_feature 1..20: note = Description of Artificial Sequence: Synthetic oligonucleotide
  misc_feature 1..20: note = Target: FXN; (+) strand; PAM type: YTN; PAM sequence: TTT
  source 1..20: mol_type = other DNA
agtagagacagggttttgcc

SEQ ID NO: 35160 - DNA, 20 bp, synthetic construct
  misc_feature 1..20: note = Description of Artificial Sequence: Synthetic oligonucleotide
  misc_feature 1..20: note = Target: FXN; (+) strand; PAM type: YTN; PAM sequence: TTA
  source 1..20: mol_type = other DNA
gtagagacagggttttgcca

SEQ ID NO: 35161 - DNA, 20 bp, synthetic construct
  misc_feature 1..20: note = Description of Artificial Sequence: Synthetic oligonucleotide
  misc_feature 1..20: note = Target: FXN; (+) strand; PAM type: YTN; PAM sequence: TTT
  source 1..20: mol_type = other DNA
tgccatattgcctaggccgg

SEQ ID NO: 35162 - DNA, 20 bp, synthetic construct
  misc_feature 1..20: note = Description of Artificial Sequence: Synthetic oligonucleotide
  misc_feature 1..20: note = Target: FXN; (+) strand; PAM type: YTN; PAM sequence: TTT
  source 1..20: mol_type = other DNA
gccatattgcctaggccggt

SEQ ID NO: 35163 - DNA, 20 bp, synthetic construct
  misc_feature 1..20: note = Description of Artificial Sequence: Synthetic oligonucleotide
  misc_feature 1..20: note = Target: FXN; (+) strand; PAM type: YTN; PAM sequence: TTG
  source 1..20: mol_type = other DNA
ccatattgcctaggccggtc

SEQ ID NO: 35164 - DNA, 20 bp, synthetic construct
  misc_feature 1..20: note = Description of Artificial Sequence: Synthetic oligonucleotide
  misc_feature 1..20: note = Target: FXN; (+) strand; PAM type: YTN; PAM sequence: TTG
  source 1..20: mol_type = other DNA
cctaggccggtctggaactt

SEQ ID NO: 35165 - DNA, 20 bp, synthetic construct
  misc_feature 1..20: note = Description of Artificial Sequence: Synthetic oligonucleotide
  misc_feature 1..20: note = Target: FXN; (+) strand; PAM type: YTN; PAM sequence: CTA
  source 1..20: mol_type = other DNA
ggccggtctggaacttctgg

SEQ ID NO: 35166 - DNA, 20 bp, synthetic construct
  misc_feature 1..20: note = Description of Artificial Sequence: Synthetic oligonucleotide
  misc_feature 1..20: note = Target: FXN; (+) strand; PAM type: YTN; PAM sequence: CTG
  source 1..20: mol_type = other DNA
gaacttctgggctcaagcca

SEQ ID NO: 35167 - DNA, 20 bp, synthetic construct
  misc_feature 1..20: note = Description of Artificial Sequence: Synthetic oligonucleotide
  misc_feature 1..20: note = Target: FXN; (+) strand; PAM type: YTN; PAM sequence: CTT
  source 1..20: mol_type = other DNA
ctgggctcaagccatctgcc

SEQ ID NO: 35168 - DNA, 20 bp, synthetic construct
  misc_feature 1..20: note = Description of Artificial Sequence: Synthetic oligonucleotide
  misc_feature 1..20: note = Target: FXN; (+) strand; PAM type: YTN; PAM sequence: TTC
  source 1..20: mol_type = other DNA
tgggctcaagccatctgcct

SEQ ID NO: 35169 - DNA, 20 bp, synthetic construct
  misc_feature 1..20: note = Description of Artificial Sequence: Synthetic oligonucleotide
  misc_feature 1..20: note = Target: FXN; (+) strand; PAM type: YTN; PAM sequence: CTG
  source 1..20: mol_type = other DNA
ggctcaagccatctgcctgc

SEQ ID NO: 35170 - DNA, 20 bp, synthetic construct
  misc_feature 1..20: note = Description of Artificial Sequence: Synthetic oligonucleotide
  misc_feature 1..20: note = Target: FXN; (+) strand; PAM type: YTN; PAM sequence: CTC
  source 1..20: mol_type = other DNA
aagccatctgcctgcctcgg

SEQ ID NO: 35171 - DNA, 20 bp, synthetic construct
  misc_feature 1..20: note = Description of Artificial Sequence: Synthetic oligonucleotide
  misc_feature 1..20: note = Target: FXN; (+) strand; PAM type: YTN; PAM sequence: CTG
  source 1..20: mol_type = other DNA
cctgcctcggcctcccaaag

SEQ ID NO: 35172 - DNA, 20 bp, synthetic construct
  misc_feature 1..20: note = Description of Artificial Sequence: Synthetic oligonucleotide
  misc_feature 1..20: note = Target: FXN; (+) strand; PAM type: YTN; PAM sequence: CTG
  source 1..20: mol_type = other DNA
cctcggcctcccaaagtgct

SEQ ID NO: 35173 - DNA, 20 bp, synthetic construct
  misc_feature 1..20: note = Description of Artificial Sequence: Synthetic oligonucleotide
  misc_feature 1..20: note = Target: FXN; (+) strand; PAM type: YTN; PAM sequence: CTC
  source 1..20: mol_type = other DNA
ggcctcccaaagtgctggaa

SEQ ID NO: 35174 - DNA, 20 bp, synthetic construct
  misc_feature 1..20: note = Description of Artificial Sequence: Synthetic oligonucleotide
  misc_feature 1..20: note = Target: FXN; (+) strand; PAM type: YTN; PAM sequence: CTC
  source 1..20: mol_type = other DNA
ccaaagtgctggaatttcag

SEQ ID NO: 35175 - DNA, 20 bp, synthetic construct
  misc_feature 1..20: note = Description of Artificial Sequence: Synthetic oligonucleotide
  misc_feature 1..20: note = Target: FXN; (+) strand; PAM type: YTN; PAM sequence: CTG
  source 1..20: mol_type = other DNA
gaatttcaggcatgagccat

SEQ ID NO: 35176 - DNA, 20 bp, synthetic construct
  misc_feature 1..20: note = Description of Artificial Sequence: Synthetic oligonucleotide
  misc_feature 1..20: note = Target: FXN; (+) strand; PAM type: YTN; PAM sequence: TTT
  source 1..20: mol_type = other DNA
caggcatgagccatgcctgg

SEQ ID NO: 35177 - DNA, 20 bp, synthetic construct
  misc_feature 1..20: note = Description of Artificial Sequence: Synthetic oligonucleotide
  misc_feature 1..20: note = Target: FXN; (+) strand; PAM type: YTN; PAM sequence: TTC
  source 1..20: mol_type = other DNA
aggcatgagccatgcctggc

SEQ ID NO: 35178 - DNA, 20 bp, synthetic construct
  misc_feature 1..20: note = Description of Artificial Sequence: Synthetic oligonucleotide
  misc_feature 1..20: note = Target: FXN; (+) strand; PAM type: YTN; PAM sequence: CTG
  source 1..20: mol_type = other DNA
gcctaaatagctctctgtgt

SEQ ID NO: 35179 - DNA, 20 bp, synthetic construct
  misc_feature 1..20: note = Description of Artificial Sequence: Synthetic oligonucleotide
  misc_feature 1..20: note = Target: FXN; (+) strand; PAM type: YTN; PAM sequence: CTA
  source 1..20: mol_type = other DNA
aatagctctctgtgtttgca

SEQ ID NO: 35180 - DNA, 20 bp, synthetic construct
  misc_feature 1..20: note = Description of Artificial Sequence: Synthetic oligonucleotide
  misc_feature 1..20: note = Target: FXN; (+) strand; PAM type: YTN; PAM sequence: CTC
  source 1..20: mol_type = other DNA
tctgtgtttgcaaaagtgtg

SEQ ID NO: 35181 - DNA, 20 bp, synthetic construct
  misc_feature 1..20: note = Description of Artificial Sequence: Synthetic oligonucleotide
  misc_feature 1..20: note = Target: FXN; (+) strand; PAM type: YTN; PAM sequence: CTC
  source 1..20: mol_type = other DNA
tgtgtttgcaaaagtgtgtt

SEQ ID NO: 35182 - DNA, 20 bp, synthetic construct
  misc_feature 1..20: note = Description of Artificial Sequence: Synthetic oligonucleotide
  misc_feature 1..20: note = Target: FXN; (+) strand; PAM type: YTN; PAM sequence: CTG
  source 1..20: mol_type = other DNA
tgtttgcaaaagtgtgttat

SEQ ID NO: 35183 - DNA, 20 bp, synthetic construct
  misc_feature 1..20: note = Description of Artificial Sequence: Synthetic oligonucleotide
  misc_feature 1..20: note = Target: FXN; (+) strand; PAM type: YTN; PAM sequence: TTT
  source 1..20: mol_type = other DNA
gcaaaagtgtgttataagaa

SEQ ID NO: 35184 - DNA, 20 bp, synthetic construct
  misc_feature 1..20: note = Description of Artificial Sequence: Synthetic oligonucleotide
  misc_feature 1..20: note = Target: FXN; (+) strand; PAM type: YTN; PAM sequence: TTG
  source 1..20: mol_type = other DNA
caaaagtgtgttataagaat

SEQ ID NO: 35185 - DNA, 20 bp, synthetic construct
  misc_feature 1..20: note = Description of Artificial Sequence: Synthetic oligonucleotide
  misc_feature 1..20: note = Target: FXN; (+) strand; PAM type: YTN; PAM sequence: TTA
  source 1..20: mol_type = other DNA
taagaatcattcagagcctc

SEQ ID NO: 35186 - DNA, 20 bp, synthetic construct
  misc_feature 1..20: note = Description of Artificial Sequence: Synthetic oligonucleotide
  misc_feature 1..20: note = Target: FXN; (+) strand; PAM type: YTN; PAM sequence: TTC
  source 1..20: mol_type = other DNA
agagcctctcgattggatgg

SEQ ID NO: 35187 - DNA, 20 bp, synthetic construct
  misc_feature 1..20: note = Description of Artificial Sequence: Synthetic oligonucleotide
  misc_feature 1..20: note = Target: FXN; (+) strand; PAM type: YTN; PAM sequence: CTC
  source 1..20: mol_type = other DNA
tcgattggatggaggctcta

SEQ ID NO: 35188 - DNA, 20 bp, synthetic construct
  misc_feature 1..20: note = Description of Artificial Sequence: Synthetic oligonucleotide
  misc_feature 1..20: note = Target: FXN; (+) strand; PAM type: YTN; PAM sequence: CTC
  source 1..20: mol_type = other DNA
gattggatggaggctctaga

SEQ ID NO: 35189 - DNA, 20 bp, synthetic construct
  misc_feature 1..20: note = Description of Artificial Sequence: Synthetic oligonucleotide
  misc_feature 1..20: note = Target: FXN; (+) strand; PAM type: YTN; PAM sequence: TTG
  source 1..20: mol_type = other DNA
gatggaggctctagaatgca

SEQ ID NO: 35190 - DNA, 20 bp, synthetic construct
  misc_feature 1..20: note = Description of Artificial Sequence: Synthetic oligonucleotide
  misc_feature 1..20: note = Target: FXN; (+) strand; PAM type: YTN; PAM sequence: CTC
  source 1..20: mol_type = other DNA
tagaatgcacagaaaaaggc

SEQ ID NO: 35191 - DNA, 20 bp, synthetic construct
  misc_feature 1..20: note = Description of Artificial Sequence: Synthetic oligonucleotide
  misc_feature 1..20: note = Target: FXN; (+) strand; PAM type: YTN; PAM sequence: CTA
  source 1..20: mol_type = other DNA
gaatgcacagaaaaaggctg

SEQ ID NO: 35192 - DNA, 20 bp, synthetic construct
  misc_feature 1..20: note = Description of Artificial Sequence: Synthetic oligonucleotide
  misc_feature 1..20: note = Target: FXN; (+) strand; PAM type: YTN; PAM sequence: CTG
  source 1..20: mol_type = other DNA
ccaccgtgtatctctgcaag

SEQ ID NO: 35193 - DNA, 20 bp, synthetic construct
  misc_feature 1..20: note = Description of Artificial Sequence: Synthetic oligonucleotide
  misc_feature 1..20: note = Target: FXN; (+) strand; PAM type: YTN; PAM sequence: CTC
  source 1..20: mol_type = other DNA
tgcaagtcatgcacaagatg

SEQ ID NO: 35194 - DNA, 20 bp, synthetic construct
  misc_feature 1..20: note = Description of Artificial Sequence: Synthetic oligonucleotide
  misc_feature 1..20: note = Target: FXN; (+) strand; PAM type: YTN; PAM sequence: CTG
  source 1..20: mol_type = other DNA
caagtcatgcacaagatggg

SEQ ID NO: 35195 - DNA, 20 bp, synthetic construct
  misc_feature 1..20: note = Description of Artificial Sequence: Synthetic oligonucleotide
  misc_feature 1..20: note = Target: FXN; (+) strand; PAM type: YTN; PAM sequence: CTT
  source 1..20: mol_type = other DNA
ccccctgcttaccagttcaa

SEQ ID NO: 35196 - DNA, 20 bp, synthetic construct
  misc_feature 1..20: note = Description of Artificial Sequence: Synthetic oligonucleotide
  misc_feature 1..20: note = Target: FXN; (+) strand; PAM type: YTN; PAM sequence: TTC
  source 1..20: mol_type = other DNA
cccctgcttaccagttcaaa

SEQ ID NO: 35197 - DNA, 20 bp, synthetic construct
  misc_feature 1..20: note = Description of Artificial Sequence: Synthetic oligonucleotide
  misc_feature 1..20: note = Target: FXN; (+) strand; PAM type: YTN; PAM sequence: CTG
  source 1..20: mol_type = other DNA
cttaccagttcaaatacaga

SEQ ID NO: 35198 - DNA, 20 bp, synthetic construct
  misc_feature 1..20: note = Description of Artificial Sequence: Synthetic oligonucleotide
  misc_feature 1..20: note = Target: FXN; (+) strand; PAM type: YTN; PAM sequence: CTT
  source 1..20: mol_type = other DNA
accagttcaaatacagagaa

SEQ ID NO: 35199 - DNA, 20 bp, synthetic construct
  misc_feature 1..20: note = Description of Artificial Sequence: Synthetic oligonucleotide
  misc_feature 1..20: note = Target: FXN; (+) strand; PAM type: YTN; PAM sequence: TTA
  source 1..20: mol_type = other DNA
ccagttcaaatacagagaac

SEQ ID NO: 35200 - DNA, 20 bp, synthetic construct
  misc_feature 1..20: note = Description of Artificial Sequence: Synthetic oligonucleotide
  misc_feature 1..20: note = Target: FXN; (+) strand; PAM type: YTN; PAM sequence: TTC
  source 1..20: mol_type = other DNA
aaatacagagaactagccct

SEQ ID NO: 35201 - DNA, 20 bp, synthetic construct
  misc_feature 1..20: note = Description of Artificial Sequence: Synthetic oligonucleotide
  misc_feature 1..20: note = Target: FXN; (+) strand; PAM type: YTN; PAM sequence: CTA
  source 1..20: mol_type = other DNA
gccctgtagctgtttctttc

SEQ ID NO: 35202 - DNA, 20 bp, synthetic construct
  misc_feature 1..20: note = Description of Artificial Sequence: Synthetic oligonucleotide
  misc_feature 1..20: note = Target: FXN; (+) strand; PAM type: YTN; PAM sequence: CTG
  source 1..20: mol_type = other DNA
tagctgtttctttcatatct

SEQ ID NO: 35203 - DNA, 20 bp, synthetic construct
  misc_feature 1..20: note = Description of Artificial Sequence: Synthetic oligonucleotide
  misc_feature 1..20: note = Target: FXN; (+) strand; PAM type: YTN; PAM sequence: CTG
  source 1..20: mol_type = other DNA
tttctttcatatctcaccca

SEQ ID NO: 35204 - DNA, 20 bp, synthetic construct
  misc_feature 1..20: note = Description of Artificial Sequence: Synthetic oligonucleotide
  misc_feature 1..20: note = Target: FXN; (+) strand; PAM type: YTN; PAM sequence: TTT
  source 1..20: mol_type = other DNA
ctttcatatctcacccattc

SEQ ID NO: 35205 - DNA, 20 bp, synthetic construct
  misc_feature 1..20: note = Description of Artificial Sequence: Synthetic oligonucleotide
  misc_feature 1..20: note = Target: FXN; (+) strand; PAM type: YTN; PAM sequence: TTC
  source 1..20: mol_type = other DNA
tttcatatctcacccattct

SEQ ID NO: 35206 - DNA, 20 bp, synthetic construct
  misc_feature 1..20: note = Description of Artificial Sequence: Synthetic oligonucleotide
  misc_feature 1..20: note = Target: FXN; (+) strand; PAM type: YTN; PAM sequence: CTT
  source 1..20: mol_type = other DNA
tcatatctcacccattctaa

SEQ ID NO: 35207 - DNA, 20 bp, synthetic construct
  misc_feature 1..20: note = Description of Artificial Sequence: Synthetic oligonucleotide
  misc_feature 1..20: note = Target: FXN; (+) strand; PAM type: YTN; PAM sequence: TTT
  source 1..20: mol_type = other DNA
catatctcacccattctaaa

SEQ ID NO: 35208 - DNA, 20 bp, synthetic construct
  misc_feature 1..20: note = Description of Artificial Sequence: Synthetic oligonucleotide
  misc_feature 1..20: note = Target: FXN; (+) strand; PAM type: YTN; PAM sequence: TTC
  source 1..20: mol_type = other DNA
atatctcacccattctaaag

SEQ ID NO: 35209 - DNA, 20 bp, synthetic construct
  misc_feature 1..20: note = Description of Artificial Sequence: Synthetic oligonucleotide
  misc_feature 1..20: note = Target: FXN; (+) strand; PAM type: YTN; PAM sequence: CTC
  source 1..20: mol_type = other DNA
acccattctaaagagaccac

SEQ ID NO: 35210 - DNA, 20 bp, synthetic construct
  misc_feature 1..20: note = Description of Artificial Sequence: Synthetic oligonucleotide
  misc_feature 1..20: note = Target: FXN; (+) strand; PAM type: YTN; PAM sequence: TTC
  source 1..20: mol_type = other DNA
taaagagaccacaggcctta

SEQ ID NO: 35211 - DNA, 20 bp, synthetic construct
  misc_feature 1..20: note = Description of Artificial Sequence: Synthetic oligonucleotide
  misc_feature 1..20: note = Target: FXN; (+) strand; PAM type: YTN; PAM sequence: CTA
  source 1..20: mol_type = other DNA
aagagaccacaggccttaga

SEQ ID NO: 35212 - DNA, 20 bp, synthetic construct
  misc_feature 1..20: note = Description of Artificial Sequence: Synthetic oligonucleotide
  misc_feature 1..20: note = Target: FXN; (+) strand; PAM type: YTN; PAM sequence: CTT
  source 1..20: mol_type = other DNA
agaagtaaaggactcttttg

SEQ ID NO: 35213 - DNA, 20 bp, synthetic construct
  misc_feature 1..20: note = Description of Artificial Sequence: Synthetic oligonucleotide
  misc_feature 1..20: note = Target: FXN; (+) strand; PAM type: YTN; PAM sequence: TTA
  source 1..20: mol_type = other DNA
gaagtaaaggactcttttgt

SEQ ID NO: 35214 - DNA, 20 bp, synthetic construct
  misc_feature 1..20: note = Description of Artificial Sequence: Synthetic oligonucleotide
  misc_feature 1..20: note = Target: FXN; (+) strand; PAM type: YTN; PAM sequence: CTC
  source 1..20: mol_type = other DNA
ttttgttgaaagagtgtttt

SEQ ID NO: 35215 - DNA, 20 bp, synthetic construct
  misc_feature 1..20: note = Description of Artificial Sequence: Synthetic oligonucleotide
  misc_feature 1..20: note = Target: FXN; (+) strand; PAM type: YTN; PAM sequence: CTT
  source 1..20: mol_type = other DNA
ttgttgaaagagtgttttca

SEQ ID NO: 35216 - DNA, 20 bp, synthetic construct
  misc_feature 1..20: note = Description of Artificial Sequence: Synthetic oligonucleotide
  misc_feature 1..20: note = Target: FXN; (+) strand; PAM type: YTN; PAM sequence: TTT
  source 1..20: mol_type = other DNA
tgttgaaagagtgttttcaa

SEQ ID NO: 35217 - DNA, 20 bp, synthetic construct
  misc_feature 1..20: note = Description of Artificial Sequence: Synthetic oligonucleotide
  misc_feature 1..20: note = Target: FXN; (+) strand; PAM type: YTN; PAM sequence: TTT
  source 1..20: mol_type = other DNA
gttgaaagagtgttttcaaa

SEQ ID NO: 35218 - DNA, 20 bp, synthetic construct
  misc_feature 1..20: note = Description of Artificial Sequence: Synthetic oligonucleotide
  misc_feature 1..20: note = Target: FXN; (+) strand; PAM type: YTN; PAM sequence: TTG
  source 1..20: mol_type = other DNA
ttgaaagagtgttttcaaat

SEQ ID NO: 35219 - DNA, 20 bp, synthetic construct
  misc_feature 1..20: note = Description of Artificial Sequence: Synthetic oligonucleotide
  misc_feature 1..20: note = Target: FXN; (+) strand; PAM type: YTN; PAM sequence: TTG
  source 1..20: mol_type = other DNA
aaagagtgttttcaaattta

SEQ ID NO: 35220 - DNA, 20 bp, synthetic construct
  misc_feature 1..20: note = Description of Artificial Sequence: Synthetic oligonucleotide
  misc_feature 1..20: note = Target: FXN; (+) strand; PAM type: YTN; PAM sequence: TTT
  source 1..20: mol_type = other DNA
tcaaatttaaatgagcattt

SEQ ID NO: 35221 - DNA, 20 bp, synthetic construct
  misc_feature 1..20: note = Description of Artificial Sequence: Synthetic oligonucleotide
  misc_feature 1..20: note = Target: FXN; (+) strand; PAM type: YTN; PAM sequence: TTT
  source 1..20: mol_type = other DNA
caaatttaaatgagcattta

SEQ ID NO: 35222 - DNA, 20 bp, synthetic construct
  misc_feature 1..20: note = Description of Artificial Sequence: Synthetic oligonucleotide
  misc_feature 1..20: note = Target: FXN; (+) strand; PAM type: YTN; PAM sequence: TTC
  source 1..20: mol_type = other DNA
aaatttaaatgagcatttat

SEQ ID NO: 35223 - DNA, 20 bp, synthetic construct
  misc_feature 1..20: note = Description of Artificial Sequence: Synthetic oligonucleotide
  misc_feature 1..20: note = Target: FXN; (+) strand; PAM type: YTN; PAM sequence: TTT
  source 1..20: mol_type = other DNA
aaatgagcatttattggtca

SEQ ID NO: 35224 - DNA, 20 bp, synthetic construct
  misc_feature 1..20: note = Description of Artificial Sequence: Synthetic oligonucleotide
  misc_feature 1..20: note = Target: FXN; (+) strand; PAM type: YTN; PAM sequence: TTA
  source 1..20: mol_type = other DNA
aatgagcatttattggtcaa

SEQ ID NO: 35225 - DNA, 20 bp, synthetic construct
  misc_feature 1..20: note = Description of Artificial Sequence: Synthetic oligonucleotide
  misc_feature 1..20: note = Target: FXN; (+) strand; PAM type: YTN; PAM sequence: TTT
  source 1..20: mol_type = other DNA
attggtcaaagatgcaccaa

SEQ ID NO: 35226 - DNA, 20 bp, synthetic construct
  misc_feature 1..20: note = Description of Artificial Sequence: Synthetic oligonucleotide
  misc_feature 1..20: note = Target: FXN; (+) strand; PAM type: YTN; PAM sequence: TTA
  source 1..20: mol_type = other DNA
ttggtcaaagatgcaccaac

SEQ ID NO: 35227 - DNA, 20 bp, synthetic construct
  misc_feature 1..20: note = Description of Artificial Sequence: Synthetic oligonucleotide
  misc_feature 1..20: note = Target: FXN; (+) strand; PAM type: YTN; PAM sequence: TTG
  source 1..20: mol_type = other DNA
gtcaaagatgcaccaactag

SEQ ID NO: 35228 - DNA, 20 bp, synthetic construct
  misc_feature 1..20: note = Description of Artificial Sequence: Synthetic oligonucleotide
  misc_feature 1..20: note = Target: FXN; (+) strand; PAM type: YTN; PAM sequence: CTA
  source 1..20: mol_type = other DNA
gtcttttgaagaattcaagg

SEQ ID NO: 35229 - DNA, 20 bp, synthetic construct
  misc_feature 1..20: note = Description of Artificial Sequence: Synthetic oligonucleotide
  misc_feature 1..20: note = Target: FXN; (+) strand; PAM type: YTN; PAM sequence: CTT
  source 1..20: mol_type = other DNA
ttgaagaattcaaggctctt

SEQ ID NO: 35230 - DNA, 20 bp, synthetic construct
  misc_feature 1..20: note = Description of Artificial Sequence: Synthetic oligonucleotide
  misc_feature 1..20: note = Target: FXN; (+) strand; PAM type: YTN; PAM sequence: TTT
  source 1..20: mol_type = other DNA
tgaagaattcaaggctcttt

SEQ ID NO: 35231 - DNA, 20 bp, synthetic construct
  misc_feature 1..20: note = Description of Artificial Sequence: Synthetic oligonucleotide
  misc_feature 1..20: note = Target: FXN; (+) strand; PAM type: YTN; PAM sequence: TTT
  source 1..20: mol_type = other DNA
gaagaattcaaggctcttta

SEQ ID NO: 35232 - DNA, 20 bp, synthetic construct
  misc_feature 1..20: note = Description of Artificial Sequence: Synthetic oligonucleotide
  misc_feature 1..20: note = Target: FXN; (+) strand; PAM type: YTN; PAM sequence: TTG
  source 1..20: mol_type = other DNA
aagaattcaaggctctttag

SEQ ID NO: 35233 - DNA, 20 bp, synthetic construct
  misc_feature 1..20: note = Description of Artificial Sequence: Synthetic oligonucleotide
  misc_feature 1..20: note = Target: FXN; (+) strand; PAM type: YTN; PAM sequence: TTC
  source 1..20: mol_type = other DNA
aaggctctttagagaaaaat

SEQ ID NO: 35234 - DNA, 20 bp, synthetic construct
  misc_feature 1..20: note = Description of Artificial Sequence: Synthetic oligonucleotide
  misc_feature 1..20: note = Target: FXN; (+) strand; PAM type: YTN; PAM sequence: CTC
  source 1..20: mol_type = other DNA
tttagagaaaaataaagcct

SEQ ID NO: 35235 - DNA, 20 bp, synthetic construct
  misc_feature 1..20: note = Description of Artificial Sequence: Synthetic oligonucleotide
  misc_feature 1..20: note = Target: FXN; (+) strand; PAM type: YTN; PAM sequence: CTT
  source 1..20: mol_type = other DNA
tagagaaaaataaagccttg

SEQ ID NO: 35236 - DNA, 20 bp, synthetic construct
  misc_feature 1..20: note = Description of Artificial Sequence: Synthetic oligonucleotide
  misc_feature 1..20: note = Target: FXN; (+) strand; PAM type: YTN; PAM sequence: TTT
  source 1..20: mol_type = other DNA
agagaaaaataaagccttgg

SEQ ID NO: 35237 - DNA, 20 bp, synthetic construct
  misc_feature 1..20: note = Description of Artificial Sequence: Synthetic oligonucleotide
  misc_feature 1..20: note = Target: FXN; (+) strand; PAM type: YTN; PAM sequence: TTA
  source 1..20: mol_type = other DNA
gagaaaaataaagccttgga

SEQ ID NO: 35238 - DNA, 20 bp, synthetic construct
  misc_feature 1..20: note = Description of Artificial Sequence: Synthetic oligonucleotide
  misc_feature 1..20: note = Target: FXN; (+) strand; PAM type: YTN; PAM sequence: CTT
  source 1..20: mol_type = other DNA
ggaggagtatctgagaagct

SEQ ID NO: 35239 - DNA, 20 bp, synthetic construct
  misc_feature 1..20: note = Description of Artificial Sequence: Synthetic oligonucleotide
  misc_feature 1..20: note = Target: FXN; (+) strand; PAM type: YTN; PAM sequence: TTG
  source 1..20: mol_type = other DNA
gaggagtatctgagaagctt

SEQ ID NO: 35240 - DNA, 20 bp, synthetic construct
  misc_feature 1..20: note = Description of Artificial Sequence: Synthetic oligonucleotide
  misc_feature 1..20: note = Target: FXN; (+) strand; PAM type: YTN; PAM sequence: CTG
  source 1..20: mol_type = other DNA
agaagcttgttagatgcgtg

SEQ ID NO: 35241 - DNA, 20 bp, synthetic construct
  misc_feature 1..20: note = Description of Artificial Sequence: Synthetic oligonucleotide
  misc_feature 1..20: note = Target: FXN; (+) strand; PAM type: YTN; PAM sequence: CTT
  source 1..20: mol_type = other DNA
gttagatgcgtgggaagagt

SEQ ID NO: 35242 - DNA, 20 bp, synthetic construct
  misc_feature 1..20: note = Description of Artificial Sequence: Synthetic oligonucleotide
  misc_feature 1..20: note = Target: FXN; (+) strand; PAM type: YTN; PAM sequence: TTG
  source 1..20: mol_type = other DNA
ttagatgcgtgggaagagtc

SEQ ID NO: 35243 - DNA, 20 bp, synthetic construct
  misc_feature 1..20: note = Description of Artificial Sequence: Synthetic oligonucleotide
  misc_feature 1..20: note = Target: FXN; (+) strand; PAM type: YTN; PAM sequence: TTA
  source 1..20: mol_type = other DNA
gatgcgtgggaagagtctgg

SEQ ID NO: 35244 - DNA, 20 bp, synthetic construct
  misc_feature 1..20: note = Description of Artificial Sequence: Synthetic oligonucleotide
  misc_feature 1..20: note = Target: FXN; (+) strand; PAM type: YTN; PAM sequence: CTG
  source 1..20: mol_type = other DNA
gaaataaaaaacttcatctg

SEQ ID NO: 35245 - DNA, 20 bp, synthetic construct
  misc_feature 1..20: note = Description of Artificial Sequence: Synthetic oligonucleotide
  misc_feature 1..20: note = Target: FXN; (+) strand; PAM type: YTN; PAM sequence: CTT
  source 1..20: mol_type = other DNA
catctggagtttctgccttc

SEQ ID NO: 35246 - DNA, 20 bp, synthetic construct
  misc_feature 1..20: note = Description of Artificial Sequence: Synthetic oligonucleotide
  misc_feature 1..20: note = Target: FXN; (+) strand; PAM type: YTN; PAM sequence: TTC
  source 1..20: mol_type = other DNA
atctggagtttctgccttct

SEQ ID NO: 35247 - DNA, 20 bp, synthetic construct
  misc_feature 1..20: note = Description of Artificial Sequence: Synthetic oligonucleotide
  misc_feature 1..20: note = Target: FXN; (+) strand; PAM type: YTN; PAM sequence: CTG
  source 1..20: mol_type = other DNA
gagtttctgccttctaccaa

SEQ ID NO: 35248 - DNA, 20 bp, synthetic construct
  misc_feature 1..20: note = Description of Artificial Sequence: Synthetic oligonucleotide
  misc_feature 1..20: note = Target: FXN; (+) strand; PAM type: YTN; PAM sequence: TTT
  source 1..20: mol_type = other DNA
ctgccttctaccaacagagc

SEQ ID NO: 35249 - DNA, 20 bp, synthetic construct
  misc_feature 1..20: note = Description of Artificial Sequence: Synthetic oligonucleotide
  misc_feature 1..20: note = Target: FXN; (+) strand; PAM type: YTN; PAM sequence: TTC
  source 1..20: mol_type = other DNA
tgccttctaccaacagagct

SEQ ID NO: 35250 - DNA, 20 bp, synthetic construct
  misc_feature 1..20: note = Description of Artificial Sequence: Synthetic oligonucleotide
  misc_feature 1..20: note = Target: FXN; (+) strand; PAM type: YTN; PAM sequence: CTG
  source 1..20: mol_type = other DNA
ccttctaccaacagagctga

SEQ ID NO: 35251 - DNA, 20 bp, synthetic construct
  misc_feature 1..20: note = Description of Artificial Sequence: Synthetic oligonucleotide
  misc_feature 1..20: note = Target: FXN; (+) strand; PAM type: YTN; PAM sequence: CTT
  source 1..20: mol_type = other DNA
ctaccaacagagctgaagct

SEQ ID NO: 35252 - DNA, 20 bp, synthetic construct
  misc_feature 1..20: note = Description of Artificial Sequence: Synthetic oligonucleotide
  misc_feature 1..20: note = Target: FXN; (+) strand; PAM type: YTN; PAM sequence: TTC
  source 1..20: mol_type = other DNA
taccaacagagctgaagcta

SEQ ID NO: 35253 - DNA, 20 bp, synthetic construct
  misc_feature 1..20: note = Description of Artificial Sequence: Synthetic oligonucleotide
  misc_feature 1..20: note = Target: FXN; (+) strand; PAM type: YTN; PAM sequence: CTA
  source 1..20: mol_type = other DNA
ccaacagagctgaagctaat

SEQ ID NO: 35254 - DNA, 20 bp, synthetic construct
  misc_feature 1..20: note = Description of Artificial Sequence: Synthetic oligonucleotide
  misc_feature 1..20: note = Target: FXN; (+) strand; PAM type: YTN; PAM sequence: CTG
  source 1..20: mol_type = other DNA
aagctaatgctctcctaaga

SEQ ID NO: 35255 - DNA, 20 bp, synthetic construct
  misc_feature 1..20: note = Description of Artificial Sequence: Synthetic oligonucleotide
  misc_feature 1..20: note = Target: FXN; (+) strand; PAM type: YTN; PAM sequence: CTA
  source 1..20: mol_type = other DNA
atgctctcctaagacaagca

SEQ ID NO: 35256 - DNA, 20 bp, synthetic construct
  misc_feature 1..20: note = Description of Artificial Sequence: Synthetic oligonucleotide
  misc_feature 1..20: note = Target: FXN; (+) strand; PAM type: YTN; PAM sequence: CTC
  source 1..20: mol_type = other DNA
tcctaagacaagcaaagcag

SEQ ID NO: 35257 - DNA, 20 bp, synthetic construct
  misc_feature 1..20: note = Description of Artificial Sequence: Synthetic oligonucleotide
  misc_feature 1..20: note = Target: FXN; (+) strand; PAM type: YTN; PAM sequence: CTC
  source 1..20: mol_type = other DNA
ctaagacaagcaaagcagat

SEQ ID NO: 35258 - DNA, 20 bp, synthetic construct
  misc_feature 1..20: note = Description of Artificial Sequence: Synthetic oligonucleotide
  misc_feature 1..20: note = Target: FXN; (+) strand; PAM type: YTN; PAM sequence: CTA
  source 1..20: mol_type = other DNA
agacaagcaaagcagatggt

SEQ ID NO: 35259 - DNA, 20 bp, synthetic construct
  misc_feature 1..20: note = Description of Artificial Sequence: Synthetic oligonucleotide
  misc_feature 1..20: note = Target: FXN; (+) strand; PAM type: YTN; PAM sequence: TTT
  source 1..20: mol_type = other DNA
gcatacttccttaccttcct

SEQ ID NO: 35260 - DNA, 20 bp, synthetic construct
  misc_feature 1..20: note = Description of Artificial Sequence: Synthetic oligonucleotide
  misc_feature 1..20: note = Target: FXN; (+) strand; PAM type: YTN; PAM sequence: TTG
  source 1..20: mol_type = other DNA
catacttccttaccttcctt

SEQ ID NO: 35261 - DNA, 20 bp, synthetic construct
  misc_feature 1..20: note = Description of Artificial Sequence: Synthetic oligonucleotide
  misc_feature 1..20: note = Target: FXN; (+) strand; PAM type: YTN; PAM sequence: CTT
  source 1..20: mol_type = other DNA
ccttaccttccttttacttc

SEQ ID NO: 35262 - DNA, 20 bp, synthetic construct
  misc_feature 1..20: note = Description of Artificial Sequence: Synthetic oligonucleotide
  misc_feature 1..20: note = Target: FXN; (+) strand; PAM type: YTN; PAM sequence: TTC
  source 1..20: mol_type = other DNA
cttaccttccttttacttcc

SEQ ID NO: 35263 - DNA, 20 bp, synthetic construct
  misc_feature 1..20: note = Description of Artificial Sequence: Synthetic oligonucleotide
  misc_feature 1..20: note = Target: FXN; (+) strand; PAM type: YTN; PAM sequence: CTT
  source 1..20: mol_type = other DNA
accttccttttacttcctct

SEQ ID NO: 35264 - DNA, 20 bp, synthetic construct
  misc_feature 1..20: note = Description of Artificial Sequence: Synthetic oligonucleotide
  misc_feature 1..20: note = Target: FXN; (+) strand; PAM type: YTN; PAM sequence: TTA
  source 1..20: mol_type = other DNA
ccttccttttacttcctctg

SEQ ID NO: 35265 - DNA, 20 bp, synthetic construct
  misc_feature 1..20: note = Description of Artificial Sequence: Synthetic oligonucleotide
  misc_feature 1..20: note = Target: FXN; (+) strand; PAM type: YTN; PAM sequence: CTT
  source 1..20: mol_type = other DNA
ccttttacttcctctgtaat

SEQ ID NO: 35266 - DNA, 20 bp, synthetic construct
  misc_feature 1..20: note = Description of Artificial Sequence: Synthetic oligonucleotide
  misc_feature 1..20: note = Target: FXN; (+) strand; PAM type: YTN; PAM sequence: TTC
  source 1..20: mol_type = other DNA
cttttacttcctctgtaata

SEQ ID NO: 35267 - DNA, 20 bp, synthetic construct
  misc_feature 1..20: note = Description of Artificial Sequence: Synthetic oligonucleotide
  misc_feature 1..20: note = Target: FXN; (+) strand; PAM type: YTN; PAM sequence: CTT
  source 1..20: mol_type = other DNA
ttacttcctctgtaatagac

SEQ ID NO: 35268 - DNA, 20 bp, synthetic construct
  misc_feature 1..20: note = Description of Artificial Sequence: Synthetic oligonucleotide
  misc_feature 1..20: note = Target: FXN; (+) strand; PAM type: YTN; PAM sequence: TTT
  source 1..20: mol_type = other DNA
tacttcctctgtaatagact

SEQ ID NO: 35269 - DNA, 20 bp, synthetic construct
  misc_feature 1..20: note = Description of Artificial Sequence: Synthetic oligonucleotide
  misc_feature 1..20: note = Target: FXN; (+) strand; PAM type: YTN; PAM sequence: TTT
  source 1..20: mol_type = other DNA
acttcctctgtaatagactt

SEQ ID NO: 35270 - DNA, 20 bp, synthetic construct
  misc_feature 1..20: note = Description of Artificial Sequence: Synthetic oligonucleotide
  misc_feature 1..20: note = Target: FXN; (+) strand; PAM type: YTN; PAM sequence: TTA
  source 1..20: mol_type = other DNA
cttcctctgtaatagacttg

SEQ ID NO: 35271 - DNA, 20 bp, synthetic construct
  misc_feature 1..20: note = Description of Artificial Sequence: Synthetic oligonucleotide
  misc_feature 1..20: note = Target: FXN; (+) strand; PAM type: YTN; PAM sequence: CTT
  source 1..20: mol_type = other DNA
cctctgtaatagacttgtca

SEQ ID NO: 35272 - DNA, 20 bp, synthetic construct
  misc_feature 1..20: note = Description of Artificial Sequence: Synthetic oligonucleotide
  misc_feature 1..20: note = Target: FXN; (+) strand; PAM type: YTN; PAM sequence: TTC
  source 1..20: mol_type = other DNA
ctctgtaatagacttgtcat

SEQ ID NO: 35273 - DNA, 20 bp, synthetic construct
  misc_feature 1..20: note = Description of Artificial Sequence: Synthetic oligonucleotide
  misc_feature 1..20: note = Target: FXN; (+) strand; PAM type: YTN; PAM sequence: CTC
  source 1..20: mol_type = other DNA
tgtaatagacttgtcatgtc

SEQ ID NO: 35274 - DNA, 20 bp, synthetic construct
  misc_feature 1..20: note = Description of Artificial Sequence: Synthetic oligonucleotide
  misc_feature 1..20: note = Target: FXN; (+) strand; PAM type: YTN; PAM sequence: CTG
  source 1..20: mol_type = other DNA
taatagacttgtcatgtctg

SEQ ID NO: 35275 - DNA, 20 bp, synthetic construct
  misc_feature 1..20: note = Description of Artificial Sequence: Synthetic oligonucleotide
  misc_feature 1..20: note = Target: FXN; (+) strand; PAM type: YTN; PAM sequence: CTT
  source 1..20: mol_type = other DNA
gtcatgtctgatgtttgagt

SEQ ID NO: 35276 - DNA, 20 bp, synthetic construct
  misc_feature 1..20: note = Description of Artificial Sequence: Synthetic oligonucleotide
  misc_feature 1..20: note = Target: FXN; (+) strand; PAM type: YTN; PAM sequence: TTG
  source 1..20: mol_type = other DNA
tcatgtctgatgtttgagtt

SEQ ID NO: 35277 - DNA, 20 bp, synthetic construct
  misc_feature 1..20: note = Description of Artificial Sequence: Synthetic oligonucleotide
  misc_feature 1..20: note = Target: FXN; (+) strand; PAM type: YTN; PAM sequence: CTG
  source 1..20: mol_type = other DNA
atgtttgagttgacgtggta

SEQ ID NO: 35278 - DNA, 20 bp, synthetic construct
  misc_feature 1..20: note = Description of Artificial Sequence: Synthetic oligonucleotide
  misc_feature 1..20: note = Target: FXN; (+) strand; PAM type: YTN; PAM sequence: TTT
  source 1..20: mol_type = other DNA
gagttgacgtggtactctaa

SEQ ID NO: 35279 - DNA, 20 bp, synthetic construct
  misc_feature 1..20: note = Description of Artificial Sequence: Synthetic oligonucleotide
  misc_feature 1..20: note = Target: FXN; (+) strand; PAM type: YTN; PAM sequence: TTG
  source 1..20: mol_type = other DNA
agttgacgtggtactctaat

SEQ ID NO: 35280 - DNA, 20 bp, synthetic construct
  misc_feature 1..20: note = Description of Artificial Sequence: Synthetic oligonucleotide
  misc_feature 1..20: note = Target: FXN; (+) strand; PAM type: YTN; PAM sequence: TTG
  source 1..20: mol_type = other DNA
acgtggtactctaatagagt

SEQ ID NO: 35281 - DNA, 20 bp, synthetic construct
  misc_feature 1..20: note = Description of Artificial Sequence: Synthetic oligonucleotide
  misc_feature 1..20: note = Target: FXN; (+) strand; PAM type: YTN; PAM sequence: CTC
  source 1..20: mol_type = other DNA
taatagagttagagtctgca

SEQ ID NO: 35282 - DNA, 20 bp, synthetic construct
  misc_feature 1..20: note = Description of Artificial Sequence: Synthetic oligonucleotide
  misc_feature 1..20: note = Target: FXN; (+) strand; PAM type: YTN; PAM sequence: CTA
  source 1..20: mol_type = other DNA
atagagttagagtctgcatt

SEQ ID NO: 35283 - DNA, 20 bp, synthetic construct
  misc_feature 1..20: note = Description of Artificial Sequence: Synthetic oligonucleotide
  misc_feature 1..20: note = Target: FXN; (+) strand; PAM type: YTN; PAM sequence: TTA
  source 1..20: mol_type = other DNA
gagtctgcattttttttatg

SEQ ID NO: 35284 - DNA, 20 bp, synthetic construct
  misc_feature 1..20: note = Description of Artificial Sequence: Synthetic oligonucleotide
  misc_feature 1..20: note = Target: FXN; (+) strand; PAM type: YTN; PAM sequence: CTG
  source 1..20: mol_type = other DNA
cattttttttatgtcctcta

SEQ ID NO: 35285 - DNA, 20 bp, synthetic construct
  misc_feature 1..20: note = Description of Artificial Sequence: Synthetic oligonucleotide
  misc_feature 1..20: note = Target: FXN; (+) strand; PAM type: YTN; PAM sequence: TTT
  source 1..20: mol_type = other DNA
tttttatgtcctctagtatg

SEQ ID NO: 35286 - DNA, 20 bp, synthetic construct
  misc_feature 1..20: note = Description of Artificial Sequence: Synthetic oligonucleotide
  misc_feature 1..20: note = Target: FXN; (+) strand; PAM type: YTN; PAM sequence: TTT
  source 1..20: mol_type = other DNA
ttttatgtcctctagtatgt

SEQ ID NO: 35287 - DNA, 20 bp, synthetic construct
  misc_feature 1..20: note = Description of Artificial Sequence: Synthetic oligonucleotide
  misc_feature 1..20: note = Target: FXN; (+) strand; PAM type: YTN; PAM sequence: TTT
  source 1..20: mol_type = other DNA
tttatgtcctctagtatgtt

SEQ ID NO: 35288 - DNA, 20 bp, synthetic construct
  misc_feature 1..20: note = Description of Artificial Sequence: Synthetic oligonucleotide
  misc_feature 1..20: note = Target: FXN; (+) strand; PAM type: YTN; PAM sequence: TTT
  source 1..20: mol_type = other DNA
ttatgtcctctagtatgttc

SEQ ID NO: 35289 - DNA, 20 bp, synthetic construct
  misc_feature 1..20: note = Description of Artificial Sequence: Synthetic oligonucleotide
  misc_feature 1..20: note = Target: FXN; (+) strand; PAM type: YTN; PAM sequence: TTT
  source 1..20: mol_type = other DNA
tatgtcctctagtatgttct

SEQ ID NO: 35290 - DNA, 20 bp, synthetic construct
  misc_feature 1..20: note = Description of Artificial Sequence: Synthetic oligonucleotide
  misc_feature 1..20: note = Target: FXN; (+) strand; PAM type: YTN; PAM sequence: TTT
  source 1..20: mol_type = other DNA
atgtcctctagtatgttctg

SEQ ID NO: 35291 - DNA, 20 bp, synthetic construct
  misc_feature 1..20: note = Description of Artificial Sequence: Synthetic oligonucleotide
  misc_feature 1..20: note = Target: FXN; (+) strand; PAM type: YTN; PAM sequence: TTA
  source 1..20: mol_type = other DNA
tgtcctctagtatgttctgg

SEQ ID NO: 35292 - DNA, 20 bp, synthetic construct
  misc_feature 1..20: note = Description of Artificial Sequence: Synthetic oligonucleotide
  misc_feature 1..20: note = Target: FXN; (+) strand; PAM type: YTN; PAM sequence: CTC
  source 1..20: mol_type = other DNA
tagtatgttctggttgatgg

SEQ ID NO: 35293 - DNA, 20 bp, synthetic construct
  misc_feature 1..20: note = Description of Artificial Sequence: Synthetic oligonucleotide
  misc_feature 1..20: note = Target: FXN; (+) strand; PAM type: YTN; PAM sequence: CTA
  source 1..20: mol_type = other DNA
gtatgttctggttgatggtt

SEQ ID NO: 35294 - DNA, 20 bp, synthetic construct
  misc_feature 1..20: note = Description of Artificial Sequence: Synthetic oligonucleotide
  misc_feature 1..20: note = Target: FXN; (+) strand; PAM type: YTN; PAM sequence: TTC
  source 1..20: mol_type = other DNA
tggttgatggttgagggcaa

SEQ ID NO: 35295 - DNA, 20 bp, synthetic construct
  misc_feature 1..20: note = Description of Artificial Sequence: Synthetic oligonucleotide
  misc_feature 1..20: note = Target: FXN; (+) strand; PAM type: YTN; PAM sequence: CTG
  source 1..20: mol_type = other DNA
gttgatggttgagggcaaca

SEQ ID NO: 35296 - DNA, 20 bp, synthetic construct
  misc_feature 1..20: note = Description of Artificial Sequence: Synthetic oligonucleotide
  misc_feature 1..20: note = Target: FXN; (+) strand; PAM type: YTN; PAM sequence: TTG
  source 1..20: mol_type = other DNA
atggttgagggcaacaaacc

SEQ ID NO: 35297 - DNA, 20 bp, synthetic construct
  misc_feature 1..20: note = Description of Artificial Sequence: Synthetic oligonucleotide
  misc_feature 1..20: note = Target: FXN; (+) strand; PAM type: YTN; PAM sequence: TTG
  source 1..20: mol_type = other DNA
agggcaacaaaccagcagtc

SEQ ID NO: 35298 - DNA, 20 bp, synthetic construct
  misc_feature 1..20: note = Description of Artificial Sequence: Synthetic oligonucleotide
  misc_feature 1..20: note = Target: FXN; (+) strand; PAM type: YTN; PAM sequence: CTG
  source 1..20: mol_type = other DNA
agacaggtcacttaactctc

SEQ ID NO: 35299 - DNA, 20 bp, synthetic construct
  misc_feature 1..20: note = Description of Artificial Sequence: Synthetic oligonucleotide
  misc_feature 1..20: note = Target: FXN; (+) strand; PAM type: YTN; PAM sequence: CTT
  source 1..20: mol_type = other DNA
aactctccgagcttcaccac

SEQ ID NO: 35300 - DNA, 20 bp, synthetic construct
  misc_feature 1..20: note = Description of Artificial Sequence: Synthetic oligonucleotide
  misc_feature 1..20: note = Target: FXN; (+) strand; PAM type: YTN; PAM sequence: TTA
  source 1..20: mol_type = other DNA
actctccgagcttcaccacc

SEQ ID NO: 35301 - DNA, 20 bp, synthetic construct
  misc_feature 1..20: note = Description of Artificial Sequence: Synthetic oligonucleotide
  misc_feature 1..20: note = Target: FXN; (+) strand; PAM type: YTN; PAM sequence: CTC
  source 1..20: mol_type = other DNA
tccgagcttcaccaccattc

SEQ ID NO: 35302 - DNA, 20 bp, synthetic construct
  misc_feature 1..20: note = Description of Artificial Sequence: Synthetic oligonucleotide
  misc_feature 1..20: note = Target: FXN; (+) strand; PAM type: YTN; PAM sequence: CTC
  source 1..20: mol_type = other DNA
cgagcttcaccaccattctc

SEQ ID NO: 35303 - DNA, 20 bp, synthetic construct
  misc_feature 1..20: note = Description of Artificial Sequence: Synthetic oligonucleotide
  misc_feature 1..20: note = Target: FXN; (+) strand; PAM type: YTN; PAM sequence: CTT
  source 1..20: mol_type = other DNA
caccaccattctcaccttgc

SEQ ID NO: 35304 - DNA, 20 bp, synthetic construct
  misc_feature 1..20: note = Description of Artificial Sequence: Synthetic oligonucleotide
  misc_feature 1..20: note = Target: FXN; (+) strand; PAM type: YTN; PAM sequence: TTC
  source 1..20: mol_type = other DNA
accaccattctcaccttgca

SEQ ID NO: 35305 - DNA, 20 bp, synthetic construct
  misc_feature 1..20: note = Description of Artificial Sequence: Synthetic oligonucleotide
  misc_feature 1..20: note = Target: FXN; (+) strand; PAM type: YTN; PAM sequence: TTC
  source 1..20: mol_type = other DNA
tcaccttgcagacctcacag

SEQ ID NO: 35306 - DNA, 20 bp, synthetic construct
  misc_feature 1..20: note = Description of Artificial Sequence: Synthetic oligonucleotide
  misc_feature 1..20: note = Target: FXN; (+) strand; PAM type: YTN; PAM sequence: CTC
  source 1..20: mol_type = other DNA
accttgcagacctcacaggg

SEQ ID NO: 35307 - DNA, 20 bp, synthetic construct
  misc_feature 1..20: note = Description of Artificial Sequence: Synthetic oligonucleotide
  misc_feature 1..20: note = Target: FXN; (+) strand; PAM type: YTN; PAM sequence: CTT
  source 1..20: mol_type = other DNA
gcagacctcacagggaacag

SEQ ID NO: 35308 - DNA, 20 bp, synthetic construct
  misc_feature 1..20: note = Description of Artificial Sequence: Synthetic oligonucleotide
  misc_feature 1..20: note = Target: FXN; (+) strand; PAM type: YTN; PAM sequence: TTG
  source 1..20: mol_type = other DNA
cagacctcacagggaacagg

SEQ ID NO: 35309 - DNA, 20 bp, synthetic construct
  misc_feature 1..20: note = Description of Artificial Sequence: Synthetic oligonucleotide
  misc_feature 1..20: note = Target: FXN; (+) strand; PAM type: YTN; PAM sequence: CTC
  source 1..20: mol_type = other DNA
acagggaacagggaaagctc

SEQ ID NO: 35310 - DNA, 20 bp, synthetic construct
  misc_feature 1..20: note = Description of Artificial Sequence: Synthetic oligonucleotide
  misc_feature 1..20: note = Target: FXN; (+) strand; PAM type: YTN; PAM sequence: CTC
  source 1..20: mol_type = other DNA
tatgagatacaacatcatta

SEQ ID NO: 35311 - DNA, 20 bp, synthetic construct
  misc_feature 1..20: note = Description of Artificial Sequence: Synthetic oligonucleotide
  misc_feature 1..20: note = Target: FXN; (+) strand; PAM type: YTN; PAM sequence: CTA
  source 1..20: mol_type = other DNA
tgagatacaacatcattatg

SEQ ID NO: 35312 - DNA, 20 bp, synthetic construct
  misc_feature 1..20: note = Description of Artificial Sequence: Synthetic oligonucleotide
  misc_feature 1..20: note = Target: FXN; (+) strand; PAM type: YTN; PAM sequence: TTA
  source 1..20: mol_type = other DNA
tgattaatcctattctgatt

SEQ ID NO: 35313 - DNA, 20 bp, synthetic construct
  misc_feature 1..20: note = Description of Artificial Sequence: Synthetic oligonucleotide
  misc_feature 1..20: note = Target: FXN; (+) strand; PAM type: YTN; PAM sequence: TTA
  source 1..20: mol_type = other DNA
atcctattctgattctgaaa

SEQ ID NO: 35314 - DNA, 20 bp, synthetic construct
  misc_feature 1..20: note = Description of Artificial Sequence: Synthetic oligonucleotide
  misc_feature 1..20: note = Target: FXN; (+) strand; PAM type: YTN; PAM sequence: CTA
  source 1..20: mol_type = other DNA
ttctgattctgaaagcaaag

SEQ ID NO: 35315 - DNA, 20 bp, synthetic construct
  misc_feature 1..20: note = Description of Artificial Sequence: Synthetic oligonucleotide
  misc_feature 1..20: note = Target: FXN; (+) strand; PAM type: YTN; PAM sequence: TTC
  source 1..20: mol_type = other DNA
tgattctgaaagcaaagctc

SEQ ID NO: 35316 - DNA, 20 bp, synthetic construct
  misc_feature 1..20: note = Description of Artificial Sequence: Synthetic oligonucleotide
  misc_feature 1..20: note = Target: FXN; (+) strand; PAM type: YTN; PAM sequence: CTG
  source 1..20: mol_type = other DNA
attctgaaagcaaagctctt

SEQ ID NO: 35317 - DNA, 20 bp, synthetic construct
  misc_feature 1..20: note = Description of Artificial Sequence: Synthetic oligonucleotide
  misc_feature 1..20: note = Target: FXN; (+) strand; PAM type: YTN; PAM sequence: TTC
  source 1..20: mol_type = other DNA
tgaaagcaaagctcttccta

SEQ ID NO: 35318 - DNA, 20 bp, synthetic construct
  misc_feature 1..20: note = Description of Artificial Sequence: Synthetic oligonucleotide
  misc_feature 1..20: note = Target: FXN; (+) strand; PAM type: YTN; PAM sequence: CTG
  source 1..20: mol_type = other DNA
aaagcaaagctcttcctaca

SEQ ID NO: 35319 - DNA, 20 bp, synthetic construct
  misc_feature 1..20: note = Description of Artificial Sequence: Synthetic oligonucleotide
  misc_feature 1..20: note = Target: FXN; (+) strand; PAM type: YTN; PAM sequence: CTC
  source 1..20: mol_type = other DNA
ttcctacacaaactcctatt

SEQ ID NO: 35320 - DNA, 20 bp, synthetic construct
  misc_feature 1..20: note = Description of Artificial Sequence: Synthetic oligonucleotide
  misc_feature 1..20: note = Target: FXN; (+) strand; PAM type: YTN; PAM sequence: CTT
  source 1..20: mol_type = other DNA
cctacacaaactcctatttc

SEQ ID NO: 35321 - DNA, 20 bp, synthetic construct
  misc_feature 1..20: note = Description of Artificial Sequence: Synthetic oligonucleotide
  misc_feature 1..20: note = Target: FXN; (+) strand; PAM type: YTN; PAM sequence: TTC
  source 1..20: mol_type = other DNA
ctacacaaactcctatttct

SEQ ID NO: 35322 - DNA, 20 bp, synthetic construct
  misc_feature 1..20: note = Description of Artificial Sequence: Synthetic oligonucleotide
  misc_feature 1..20: note = Target: FXN; (+) strand; PAM type: YTN; PAM sequence: CTA
  source 1..20: mol_type = other DNA
cacaaactcctatttctaaa

SEQ ID NO: 35323 - DNA, 20 bp, synthetic construct
  misc_feature 1..20: note = Description of Artificial Sequence: Synthetic oligonucleotide
  misc_feature 1..20: note = Target: FXN; (+) strand; PAM type: YTN; PAM sequence: CTC
  source 1..20: mol_type = other DNA
ctatttctaaatactaaaag

SEQ ID NO: 35324 - DNA, 20 bp, synthetic construct
  misc_feature 1..20: note = Description of Artificial Sequence: Synthetic oligonucleotide
  misc_feature 1..20: note = Target: FXN; (+) strand; PAM type: YTN; PAM sequence: CTA
  source 1..20: mol_type = other DNA
tttctaaatactaaaagaca

SEQ ID NO: 35325 - DNA, 20 bp, synthetic construct
  misc_feature 1..20: note = Description of Artificial Sequence: Synthetic oligonucleotide
  misc_feature 1..20: note = Target: FXN; (+) strand; PAM type: YTN; PAM sequence: TTT
  source 1..20: mol_type = other DNA
ctaaatactaaaagacattt

SEQ ID NO: 35326 - DNA, 20 bp, synthetic construct
  misc_feature 1..20: note = Description of Artificial Sequence: Synthetic oligonucleotide
  misc_feature 1..20: note = Target: FXN; (+) strand; PAM type: YTN; PAM sequence: TTC
  source 1..20: mol_type = other DNA
taaatactaaaagacatttc

SEQ ID NO: 35327 - DNA, 20 bp, synthetic construct
  misc_feature 1..20: note = Description of Artificial Sequence: Synthetic oligonucleotide
  misc_feature 1..20: note = Target: FXN; (+) strand; PAM type: YTN; PAM sequence: CTA
  source 1..20: mol_type = other DNA
aatactaaaagacatttctt

SEQ ID NO: 35328 - DNA, 20 bp, synthetic construct
  misc_feature 1..20: note = Description of Artificial Sequence: Synthetic oligonucleotide
  misc_feature 1..20: note = Target: FXN; (+) strand; PAM type: YTN; PAM sequence: CTA
  source 1..20: mol_type = other DNA
aaagacatttctttatggtg

SEQ ID NO: 35329 - DNA, 20 bp, synthetic construct
  misc_feature 1..20: note = Description of Artificial Sequence: Synthetic oligonucleotide
  misc_feature 1..20: note = Target: FXN; (+) strand; PAM type: YTN; PAM sequence: TTT
  source 1..20: mol_type = other DNA
ctttatggtgtattttgtgt

SEQ ID NO: 35330 - DNA, 20 bp, synthetic construct
  misc_feature 1..20: note = Description of Artificial Sequence: Synthetic oligonucleotide
  misc_feature 1..20: note = Target: FXN; (+) strand; PAM type: YTN; PAM sequence: TTC
  source 1..20: mol_type = other DNA
tttatggtgtattttgtgta

SEQ ID NO: 35331 - DNA, 20 bp, synthetic construct
  misc_feature 1..20: note = Description of Artificial Sequence: Synthetic oligonucleotide
  misc_feature 1..20: note = Target: FXN; (+) strand; PAM type: YTN; PAM sequence: CTT
  source 1..20: mol_type = other DNA
tatggtgtattttgtgtact

SEQ ID NO: 35332 - DNA, 20 bp, synthetic construct
  misc_feature 1..20: note = Description of Artificial Sequence: Synthetic oligonucleotide
  misc_feature 1..20: note = Target: FXN; (+) strand; PAM type: YTN; PAM sequence: TTT
  source 1..20: mol_type = other DNA
atggtgtattttgtgtactt

SEQ ID NO: 35333 - DNA, 20 bp, synthetic construct
  misc_feature 1..20: note = Description of Artificial Sequence: Synthetic oligonucleotide
  misc_feature 1..20: note = Target: FXN; (+) strand; PAM type: YTN; PAM sequence: TTA
  source 1..20: mol_type = other DNA
tggtgtattttgtgtacttg

SEQ ID NO: 35334 - DNA, 20 bp, synthetic construct
  misc_feature 1..20: note = Description of Artificial Sequence: Synthetic oligonucleotide
  misc_feature 1..20: note = Target: FXN; (+) strand; PAM type: YTN; PAM sequence: TTT
  source 1..20: mol_type = other DNA
tgtgtacttgtagaaatgga

SEQ ID NO: 35335 - DNA, 20 bp, synthetic construct
  misc_feature 1..20: note = Description of Artificial Sequence: Synthetic oligonucleotide
  misc_feature 1..20: note = Target: FXN; (+) strand; PAM type: YTN; PAM sequence: TTT
  source 1..20: mol_type = other DNA
gtgtacttgtagaaatggaa

SEQ ID NO: 35336 - DNA, 20 bp, synthetic construct
  misc_feature 1..20: note = Description of Artificial Sequence: Synthetic oligonucleotide
  misc_feature 1..20: note = Target: FXN; (+) strand; PAM type: YTN; PAM sequence: TTG
  source 1..20: mol_type = other DNA
tgtacttgtagaaatggaaa

SEQ ID NO: 35337 - DNA, 20 bp, synthetic construct
  misc_feature 1..20: note = Description of Artificial Sequence: Synthetic oligonucleotide
  misc_feature 1..20: note = Target: FXN; (+) strand; PAM type: YTN; PAM sequence: CTT
  source 1..20: mol_type = other DNA
gtagaaatggaaagtgttga

SEQ ID NO: 35338 - DNA, 20 bp, synthetic construct
  misc_feature 1..20: note = Description of Artificial Sequence: Synthetic oligonucleotide
  misc_feature 1..20: note = Target: FXN; (+) strand; PAM type: YTN; PAM sequence: TTG
  source 1..20: mol_type = other DNA
tagaaatggaaagtgttgag

SEQ ID NO: 35339 - DNA, 20 bp, synthetic construct
  misc_feature 1..20: note = Description of Artificial Sequence: Synthetic oligonucleotide
  misc_feature 1..20: note = Target: FXN; (+) strand; PAM type: YTN; PAM sequence: TTG
  source 1..20: mol_type = other DNA
agataaaacatgaagcaatg

SEQ ID NO: 35340 - DNA, 20 bp, synthetic construct
  misc_feature 1..20: note = Description of Artificial Sequence: Synthetic oligonucleotide
  misc_feature 1..20: note = Target: FXN; (+) strand; PAM type: YTN; PAM sequence: CTA
  source 1..20: mol_type = other DNA
actttttcttgttttaattt

SEQ ID NO: 35341 - DNA, 20 bp, synthetic construct
  misc_feature 1..20: note = Description of Artificial Sequence: Synthetic oligonucleotide
  misc_feature 1..20: note = Target: FXN; (+) strand; PAM type: YTN; PAM sequence: CTT
  source 1..20: mol_type = other DNA
tttcttgttttaatttcttt

SEQ ID NO: 35342 - DNA, 20 bp, synthetic construct
  misc_feature 1..20: note = Description of Artificial Sequence: Synthetic oligonucleotide
  misc_feature 1..20: note = Target: FXN; (+) strand; PAM type: YTN; PAM sequence: TTT
  source 1..20: mol_type = other DNA
ttcttgttttaatttcttta

SEQ ID NO: 35343 - DNA, 20 bp, synthetic construct
  misc_feature 1..20: note = Description of Artificial Sequence: Synthetic oligonucleotide
  misc_feature 1..20: note = Target: FXN; (+) strand; PAM type: YTN; PAM sequence: TTT
  source 1..20: mol_type = other DNA
tcttgttttaatttctttat

SEQ ID NO: 35344 - DNA, 20 bp, synthetic construct
  misc_feature 1..20: note = Description of Artificial Sequence: Synthetic oligonucleotide
  misc_feature 1..20: note = Target: FXN; (+) strand; PAM type: YTN; PAM sequence: TTT
  source 1..20: mol_type = other DNA
cttgttttaatttctttatg

SEQ ID NO: 35345 - DNA, 20 bp, synthetic construct
  misc_feature 1..20: note = Description of Artificial Sequence: Synthetic oligonucleotide
  misc_feature 1..20: note = Target: FXN; (+) strand; PAM type: YTN; PAM sequence: TTC
  source 1..20: mol_type = other DNA
ttgttttaatttctttatgc

SEQ ID NO: 35346 - DNA, 20 bp, synthetic construct
  misc_feature 1..20: note = Description of Artificial Sequence: Synthetic oligonucleotide
  misc_feature 1..20: note = Target: FXN; (+) strand; PAM type: YTN; PAM sequence: CTT
  source 1..20: mol_type = other DNA
gttttaatttctttatgctt

SEQ ID NO: 35347 - DNA, 20 bp, synthetic construct
  misc_feature 1..20: note = Description of Artificial Sequence: Synthetic oligonucleotide
  misc_feature 1..20: note = Target: FXN; (+) strand; PAM type: YTN; PAM sequence: TTG
  source 1..20: mol_type = other DNA
ttttaatttctttatgcttt

SEQ ID NO: 35348 - DNA, 20 bp, synthetic construct
  misc_feature 1..20: note = Description of Artificial Sequence: Synthetic oligonucleotide
  misc_feature 1..20: note = Target: FXN; (+) strand; PAM type: YTN; PAM sequence: TTT
  source 1..20: mol_type = other DNA
taatttctttatgctttttt

SEQ ID NO: 35349 - DNA, 20 bp, synthetic construct
  misc_feature 1..20: note = Description of Artificial Sequence: Synthetic oligonucleotide
  misc_feature 1..20: note = Target: FXN; (+) strand; PAM type: YTN; PAM sequence: TTT
  source 1..20: mol_type = other DNA
aatttctttatgcttttttt

SEQ ID NO: 35350 - DNA, 20 bp, synthetic construct
  misc_feature 1..20: note = Description of Artificial Sequence: Synthetic oligonucleotide
  misc_feature 1..20: note = Target: FXN; (+) strand; PAM type: YTN; PAM sequence: TTA
  source 1..20: mol_type = other DNA
atttctttatgctttttttc

SEQ ID NO: 35351 - DNA, 20 bp, synthetic construct
  misc_feature 1..20: note = Description of Artificial Sequence: Synthetic oligonucleotide
  misc_feature 1..20: note = Target: FXN; (+) strand; PAM type: YTN; PAM sequence: TTT
  source 1..20: mol_type = other DNA
ctttatgctttttttccacc

SEQ ID NO: 35352 - DNA, 20 bp, synthetic construct
  misc_feature 1..20: note = Description of Artificial Sequence: Synthetic oligonucleotide
  misc_feature 1..20: note = Target: FXN; (+) strand; PAM type: YTN; PAM sequence: TTC
  source 1..20: mol_type = other DNA
tttatgctttttttccacct

SEQ ID NO: 35353 - DNA, 20 bp, synthetic construct
  misc_feature 1..20: note = Description of Artificial Sequence: Synthetic oligonucleotide
  misc_feature 1..20: note = Target: FXN; (+) strand; PAM type: YTN; PAM sequence: CTT
  source 1..20: mol_type = other DNA
tatgctttttttccacctaa

SEQ ID NO: 35354 - DNA, 20 bp, synthetic construct
  misc_feature 1..20: note = Description of Artificial Sequence: Synthetic oligonucleotide
  misc_feature 1..20: note = Target: FXN; (+) strand; PAM type: YTN; PAM sequence: TTT
  source 1..20: mol_type = other DNA
atgctttttttccacctaat

SEQ ID NO: 35355 - DNA, 20 bp, synthetic construct
  misc_feature 1..20: note = Description of Artificial Sequence: Synthetic oligonucleotide
  misc_feature 1..20: note = Target: FXN; (+) strand; PAM type: YTN; PAM sequence: TTA
  source 1..20: mol_type = other DNA
tgctttttttccacctaatc

SEQ ID NO: 35356 - DNA, 20 bp, synthetic construct
  misc_feature 1..20: note = Description of Artificial Sequence: Synthetic oligonucleotide
  misc_feature 1..20: note = Target: FXN; (+) strand; PAM type: YTN; PAM sequence: CTT
  source 1..20: mol_type = other DNA
tttttccacctaatccccta

SEQ ID NO: 35357 - DNA, 20 bp, synthetic construct
  misc_feature 1..20: note = Description of Artificial Sequence: Synthetic oligonucleotide
  misc_feature 1..20: note = Target: FXN; (+) strand; PAM type: YTN; PAM sequence: TTT
  source 1..20: mol_type = other DNA
ttttccacctaatcccctag

SEQ ID NO: 35358 - DNA, 20 bp, synthetic construct
  misc_feature 1..20: note = Description of Artificial Sequence: Synthetic oligonucleotide
  misc_feature 1..20: note = Target: FXN; (+) strand; PAM type: YTN; PAM sequence: TTT
  source 1..20: mol_type = other DNA
tttccacctaatcccctaga

SEQ ID NO: 35359 - DNA, 20 bp, synthetic construct
  misc_feature 1..20: note = Description of Artificial Sequence: Synthetic oligonucleotide
  misc_feature 1..20: note = Target: FXN; (+) strand; PAM type: YTN; PAM sequence: TTT
  source 1..20: mol_type = other DNA
ttccacctaatcccctagag

SEQ ID NO: 35360 - DNA, 20 bp, synthetic construct
  misc_feature 1..20: note = Description of Artificial Sequence: Synthetic oligonucleotide
  misc_feature 1..20: note = Target: FXN; (+) strand; PAM type: YTN; PAM sequence: TTT
  source 1..20: mol_type = other DNA
tccacctaatcccctagagt

SEQ ID NO: 35361 - DNA, 20 bp, synthetic construct
  misc_feature 1..20: note = Description of Artificial Sequence: Synthetic oligonucleotide
  misc_feature 1..20: note = Target: FXN; (+) strand; PAM type: YTN; PAM sequence: TTT
  source 1..20: mol_type = other DNA
ccacctaatcccctagagtg

SEQ ID NO: 35362 - DNA, 20 bp, synthetic construct
  misc_feature 1..20: note = Description of Artificial Sequence: Synthetic oligonucleotide
  misc_feature 1..20: note = Target: FXN; (+) strand; PAM type: YTN; PAM sequence: TTC
  source 1..20: mol_type = other DNA
cacctaatcccctagagtgg

SEQ ID NO: 35363 - DNA, 20 bp, synthetic construct
  misc_feature 1..20: note = Description of Artificial Sequence: Synthetic oligonucleotide
  misc_feature 1..20: note = Target: FXN; (+) strand; PAM type: YTN; PAM sequence: CTA
  source 1..20: mol_type = other DNA
atcccctagagtggtgtctt

SEQ ID NO: 35364 - DNA, 20 bp, synthetic construct
  misc_feature 1..20: note = Description of Artificial Sequence: Synthetic oligonucleotide
  misc_feature 1..20: note = Target: FXN; (+) strand; PAM type: YTN; PAM sequence: CTA
  source 1..20: mol_type = other DNA
gagtggtgtcttaactgtca

SEQ ID NO: 35365 - DNA, 20 bp, synthetic construct
  misc_feature 1..20: note = Description of Artificial Sequence: Synthetic oligonucleotide
  misc_feature 1..20: note = Target: FXN; (+) strand; PAM type: YTN; PAM sequence: CTT
  source 1..20: mol_type = other DNA
aactgtcaaactgggtggag

SEQ ID NO: 35366 - DNA, 20 bp, synthetic construct
  misc_feature 1..20: note = Description of Artificial Sequence: Synthetic oligonucleotide
  misc_feature 1..20: note = Target: FXN; (+) strand; PAM type: YTN; PAM sequence: TTA
  source 1..20: mol_type = other DNA
actgtcaaactgggtggaga

SEQ ID NO: 35367 - DNA, 20 bp, synthetic construct
  misc_feature 1..20: note = Description of Artificial Sequence: Synthetic oligonucleotide
  misc_feature 1..20: note = Target: FXN; (+) strand; PAM type: YTN; PAM sequence: CTG
  source 1..20: mol_type = other DNA
tcaaactgggtggagatcta

SEQ ID NO: 35368 - DNA, 20 bp, synthetic construct
  misc_feature 1..20: note = Description of Artificial Sequence: Synthetic oligonucleotide
  misc_feature 1..20: note = Target: FXN; (+) strand; PAM type: YTN; PAM sequence: CTG
  source 1..20: mol_type = other DNA
ggtggagatctaggaaccta

SEQ ID NO: 35369 - DNA, 20 bp, synthetic construct
  misc_feature 1..20: note = Description of Artificial Sequence: Synthetic oligonucleotide
  misc_feature 1..20: note = Target: FXN; (+) strand; PAM type: YTN; PAM sequence: CTA
  source 1..20: mol_type = other DNA
ggaacctatgtgatcaacaa

SEQ ID NO: 35370 - DNA, 20 bp, synthetic construct
  misc_feature 1..20: note = Description of Artificial Sequence: Synthetic oligonucleotide
  misc_feature 1..20: note = Target: FXN; (+) strand; PAM type: YTN; PAM sequence: CTA
  source 1..20: mol_type = other DNA
tgtgatcaacaagcagacgc

SEQ ID NO: 35371 - DNA, 20 bp, synthetic construct
  misc_feature 1..20: note = Description of Artificial Sequence: Synthetic oligonucleotide
  misc_feature 1..20: note = Target: FXN; (+) strand; PAM type: YTN; PAM sequence: CTG
  source 1..20: mol_type = other DNA
gctatcttctccatccaggt

SEQ ID NO: 35372 - DNA, 20 bp, synthetic construct
  misc_feature 1..20: note = Description of Artificial Sequence: Synthetic oligonucleotide
  misc_feature 1..20: note = Target: FXN; (+) strand; PAM type: YTN; PAM sequence: CTA
  source 1..20: mol_type = other DNA
tcttctccatccaggtatgt

SEQ ID NO: 35373 - DNA, 20 bp, synthetic construct
  misc_feature 1..20: note = Description of Artificial Sequence: Synthetic oligonucleotide
  misc_feature 1..20: note = Target: FXN; (+) strand; PAM type: YTN; PAM sequence: CTT
  source 1..20: mol_type = other DNA
ctccatccaggtatgtaggt

SEQ ID NO: 35374 - DNA, 20 bp, synthetic construct
  misc_feature 1..20: note = Description of Artificial Sequence: Synthetic oligonucleotide
  misc_feature 1..20: note = Target: FXN; (+) strand; PAM type: YTN; PAM sequence: TTC
  source 1..20: mol_type = other DNA
tccatccaggtatgtaggta

SEQ ID NO: 35375 - DNA, 20 bp, synthetic construct
  misc_feature 1..20: note = Description of Artificial Sequence: Synthetic oligonucleotide
  misc_feature 1..20: note = Target: FXN; (+) strand; PAM type: YTN; PAM sequence: CTC
  source 1..20: mol_type = other DNA
catccaggtatgtaggtatg

SEQ ID NO: 35376 - DNA, 20 bp, synthetic construct
  misc_feature 1..20: note = Description of Artificial Sequence: Synthetic oligonucleotide
  misc_feature 1..20: note = Target: FXN; (+) strand; PAM type: YTN; PAM sequence: TTC
  source 1..20: mol_type = other DNA
agaagtcaacatatgtaatt

SEQ ID NO: 35377 - DNA, 20 bp, synthetic construct
  misc_feature 1..20: note = Description of Artificial Sequence: Synthetic oligonucleotide
  misc_feature 1..20: note = Target: FXN; (+) strand; PAM type: YTN; PAM sequence: TTC
  source 1..20: mol_type = other DNA
ttaaagacttccgaaatgtg

SEQ ID NO: 35378 - DNA, 20 bp, synthetic construct
  misc_feature 1..20: note = Description of Artificial Sequence: Synthetic oligonucleotide
  misc_feature 1..20: note = Target: FXN; (+) strand; PAM type: YTN; PAM sequence: CTT
  source 1..20: mol_type = other DNA
aaagacttccgaaatgtgac

SEQ ID NO: 35379 - DNA, 20 bp, synthetic construct
  misc_feature 1..20: note = Description of Artificial Sequence: Synthetic oligonucleotide
  misc_feature 1..20: note = Target: FXN; (+) strand; PAM type: YTN; PAM sequence: TTA
  source 1..20: mol_type = other DNA
aagacttccgaaatgtgaca

SEQ ID NO: 35380 - DNA, 20 bp, synthetic construct
  misc_feature 1..20: note = Description of Artificial Sequence: Synthetic oligonucleotide
  misc_feature 1..20: note = Target: FXN; (+) strand; PAM type: YTN; PAM sequence: CTT
  source 1..20: mol_type = other DNA
ccgaaatgtgacattgtgga

SEQ ID NO: 35381 - DNA, 20 bp, synthetic construct
  misc_feature 1..20: note = Description of Artificial Sequence: Synthetic oligonucleotide
  misc_feature 1..20: note = Target: FXN; (+) strand; PAM type: YTN; PAM sequence: TTC
  source 1..20: mol_type = other DNA
cgaaatgtgacattgtggac

SEQ ID NO: 35382 - DNA, 20 bp, synthetic construct
  misc_feature 1..20: note = Description of Artificial Sequence: Synthetic oligonucleotide
  misc_feature 1..20: note = Target: FXN; (+) strand; PAM type: YTN; PAM sequence: TTG
  source 1..20: mol_type = other DNA
tggaccatttaagaaatgtc

SEQ ID NO: 35383 - DNA, 20 bp, synthetic construct
  misc_feature 1..20: note = Description of Artificial Sequence: Synthetic oligonucleotide
  misc_feature 1..20: note = Target: FXN; (+) strand; PAM type: YTN; PAM sequence: TTT
  source 1..20: mol_type = other DNA
aagaaatgtcggctgagcac

SEQ ID NO: 35384 - DNA, 20 bp, synthetic construct
  misc_feature 1..20: note = Description of Artificial Sequence: Synthetic oligonucleotide
  misc_feature 1..20: note = Target: FXN; (+) strand; PAM type: YTN; PAM sequence: TTA
  source 1..20: mol_type = other DNA
agaaatgtcggctgagcaca

SEQ ID NO: 35385 - DNA, 20 bp, synthetic construct
  misc_feature 1..20: note = Description of Artificial Sequence: Synthetic oligonucleotide
  misc_feature 1..20: note = Target: FXN; (+) strand; PAM type: YTN; PAM sequence: CTG
  source 1..20: mol_type = other DNA
agcacagtggctgacacctg

SEQ ID NO: 35386 - DNA, 20 bp, synthetic construct
  misc_feature 1..20: note = Description of Artificial Sequence: Synthetic oligonucleotide
  misc_feature 1..20: note = Target: FXN; (+) strand; PAM type: YTN; PAM sequence: CTG
  source 1..20: mol_type = other DNA
acacctgtaatcccaacact

SEQ ID NO: 35387 - DNA, 20 bp, synthetic construct
  misc_feature 1..20: note = Description of Artificial Sequence: Synthetic oligonucleotide
  misc_feature 1..20: note = Target: FXN; (+) strand; PAM type: YTN; PAM sequence: CTG
  source 1..20: mol_type = other DNA
taatcccaacactttgagag

SEQ ID NO: 35388 - DNA, 20 bp, synthetic construct
  misc_feature 1..20: note = Description of Artificial Sequence: Synthetic oligonucleotide
  misc_feature 1..20: note = Target: FXN; (+) strand; PAM type: YTN; PAM sequence: CTT
  source 1..20: mol_type = other DNA
tgagaggctgaggtaggagg

SEQ ID NO: 35389 - DNA, 20 bp, synthetic construct
  misc_feature 1..20: note = Description of Artificial Sequence: Synthetic oligonucleotide
  misc_feature 1..20: note = Target: FXN; (+) strand; PAM type: YTN; PAM sequence: TTT
  source 1..20: mol_type = other DNA
gagaggctgaggtaggagga

SEQ ID NO: 35390 - DNA, 20 bp, synthetic construct
  misc_feature 1..20: note = Description of Artificial Sequence: Synthetic oligonucleotide
  misc_feature 1..20: note = Target: FXN; (+) strand; PAM type: YTN; PAM sequence: TTG
  source 1..20: mol_type = other DNA
agaggctgaggtaggaggat

SEQ ID NO: 35391 - DNA, 20 bp, synthetic construct
  misc_feature 1..20: note = Description of Artificial Sequence: Synthetic oligonucleotide
  misc_feature 1..20: note = Target: FXN; (+) strand; PAM type: YTN; PAM sequence: CTG
  source 1..20: mol_type = other DNA
aggtaggaggatcacttgag

SEQ ID NO: 35392 - DNA, 20 bp, synthetic construct
  misc_feature 1..20: note = Description of Artificial Sequence: Synthetic oligonucleotide
  misc_feature 1..20: note = Target: FXN; (+) strand; PAM type: YTN; PAM sequence: CTT
  source 1..20: mol_type = other DNA
gaggacaggagttcagaacc

SEQ ID NO: 35393 - DNA, 20 bp, synthetic construct
  misc_feature 1..20: note = Description of Artificial Sequence: Synthetic oligonucleotide
  misc_feature 1..20: note = Target: FXN; (+) strand; PAM type: YTN; PAM sequence: TTG
  source 1..20: mol_type = other DNA
aggacaggagttcagaacca

SEQ ID NO: 35394 - DNA, 20 bp, synthetic construct
  misc_feature 1..20: note = Description of Artificial Sequence: Synthetic oligonucleotide
  misc_feature 1..20: note = Target: FXN; (+) strand; PAM type: YTN; PAM sequence: TTC
  source 1..20: mol_type = other DNA
agaaccatcctgggcaacat

SEQ ID NO: 35395 - DNA, 20 bp, synthetic construct
  misc_feature 1..20: note = Description of Artificial Sequence: Synthetic oligonucleotide
  misc_feature 1..20: note = Target: FXN; (+) strand; PAM type: YTN; PAM sequence: CTG
  source 1..20: mol_type = other DNA
ggcaacatagtgagtccctg

SEQ ID NO: 35396 - DNA, 20 bp, synthetic construct
  misc_feature 1..20: note = Description of Artificial Sequence: Synthetic oligonucleotide
  misc_feature 1..20: note = Target: FXN; (+) strand; PAM type: YTN; PAM sequence: CTG
  source 1..20: mol_type = other DNA
tctctgtaaagaaaataaaa

SEQ ID NO: 35397 - DNA, 20 bp, synthetic construct
  misc_feature 1..20: note = Description of Artificial Sequence: Synthetic oligonucleotide
  misc_feature 1..20: note = Target: FXN; (+) strand; PAM type: YTN; PAM sequence: CTC
  source 1..20: mol_type = other DNA
tgtaaagaaaataaaaataa

SEQ ID NO: 35398 - DNA, 20 bp, synthetic construct
  misc_feature 1..20: note = Description of Artificial Sequence: Synthetic oligonucleotide
  misc_feature 1..20: note = Target: FXN; (+) strand; PAM type: YTN; PAM sequence: CTG
  source 1..20: mol_type = other DNA
taaagaaaataaaaataaag

SEQ ID NO: 35399 - DNA, 20 bp, synthetic construct
  misc_feature 1..20: note = Description of Artificial Sequence: Synthetic oligonucleotide
  misc_feature 1..20: note = Target: FXN; (+) strand; PAM type: YTN; PAM sequence: CTG
  source 1..20: mol_type = other DNA
ggtgcaggcttacacctgta

SEQ ID NO: 35400 - DNA, 20 bp, synthetic construct
  misc_feature 1..20: note = Description of Artificial Sequence: Synthetic oligonucleotide
  misc_feature 1..20: note = Target: FXN; (+) strand; PAM type: YTN; PAM sequence: CTT
  source 1..20: mol_type = other DNA
acacctgtaatcccagcact

SEQ ID NO: 35401 - DNA, 20 bp, synthetic construct
  misc_feature 1..20: note = Description of Artificial Sequence: Synthetic oligonucleotide
  misc_feature 1..20: note = Target: FXN; (+) strand; PAM type: YTN; PAM sequence: TTA
  source 1..20: mol_type = other DNA
cacctgtaatcccagcactt

SEQ ID NO: 35402 - DNA, 20 bp, synthetic construct
  misc_feature 1..20: note = Description of Artificial Sequence: Synthetic oligonucleotide
  misc_feature 1..20: note = Target: FXN; (+) strand; PAM type: YTN; PAM sequence: CTG
  source 1..20: mol_type = other DNA
taatcccagcactttgggag

SEQ ID NO: 35403 - DNA, 20 bp, synthetic construct
  misc_feature 1..20: note = Description of Artificial Sequence: Synthetic oligonucleotide
  misc_feature 1..20: note = Target: FXN; (+) strand; PAM type: YTN; PAM sequence: CTT
  source 1..20: mol_type = other DNA
tgggaggccaaggcctgtgg

SEQ ID NO: 35404 - DNA, 20 bp, synthetic construct
  misc_feature 1..20: note = Description of Artificial Sequence: Synthetic oligonucleotide
  misc_feature 1..20: note = Target: FXN; (+) strand; PAM type: YTN; PAM sequence: TTT
  source 1..20: mol_type = other DNA
gggaggccaaggcctgtgga

SEQ ID NO: 35405 - DNA, 20 bp, synthetic construct
  misc_feature 1..20: note = Description of Artificial Sequence: Synthetic oligonucleotide
  misc_feature 1..20: note = Target: FXN; (+) strand; PAM type: YTN; PAM sequence: TTG
  source 1..20: mol_type = other DNA
ggaggccaaggcctgtggat

SEQ ID NO: 35406 - DNA, 20 bp, synthetic construct
  misc_feature 1..20: note = Description of Artificial Sequence: Synthetic oligonucleotide
  misc_feature 1..20: note = Target: FXN; (+) strand; PAM type: YTN; PAM sequence: CTG
  source 1..20: mol_type = other DNA
tggatcacttgagctcagga

SEQ ID NO: 35407 - DNA, 20 bp, synthetic construct
  misc_feature 1..20: note = Description of Artificial Sequence: Synthetic oligonucleotide
  misc_feature 1..20: note = Target: FXN; (+) strand; PAM type: YTN; PAM sequence: CTT
  source 1..20: mol_type = other DNA
gagctcaggagtttgagacc

SEQ ID NO: 35408 - DNA, 20 bp, synthetic construct
  misc_feature 1..20: note = Description of Artificial Sequence: Synthetic oligonucleotide
  misc_feature 1..20: note = Target: FXN; (+) strand; PAM type: YTN; PAM sequence: TTG
  source 1..20: mol_type = other DNA
agctcaggagtttgagacca

SEQ ID NO: 35409 - DNA, 20 bp, synthetic construct
  misc_feature 1..20: note = Description of Artificial Sequence: Synthetic oligonucleotide
  misc_feature 1..20: note = Target: FXN; (+) strand; PAM type: YTN; PAM sequence: CTC
  source 1..20: mol_type = other DNA
aggagtttgagaccagcctg

SEQ ID NO: 35410 - DNA, 20 bp, synthetic construct
  misc_feature 1..20: note = Description of Artificial Sequence: Synthetic oligonucleotide
  misc_feature 1..20: note = Target: FXN; (+) strand; PAM type: YTN; PAM sequence: TTT
  source 1..20: mol_type = other DNA
gagaccagcctgggcaatgt

SEQ ID NO: 35411 - DNA, 20 bp, synthetic construct
  misc_feature 1..20: note = Description of Artificial Sequence: Synthetic oligonucleotide
  misc_feature 1..20: note = Target: FXN; (+) strand; PAM type: YTN; PAM sequence: TTG
  source 1..20: mol_type = other DNA
agaccagcctgggcaatgtc

SEQ ID NO: 35412 - DNA, 20 bp, synthetic construct
  misc_feature 1..20: note = Description of Artificial Sequence: Synthetic oligonucleotide
  misc_feature 1..20: note = Target: FXN; (+) strand; PAM type: YTN; PAM sequence: CTG
  source 1..20: mol_type = other DNA
ggcaatgtcacaaagcccca

SEQ ID NO: 35413 - DNA, 20 bp, synthetic construct
  misc_feature 1..20: note = Description of Artificial Sequence: Synthetic oligonucleotide
  misc_feature 1..20: note = Target: FXN; (+) strand; PAM type: YTN; PAM sequence: CTC
  source 1..20: mol_type = other DNA
tactaaaaatataaaaatta

SEQ ID NO: 35414 - DNA, 20 bp, synthetic construct
  misc_feature 1..20: note = Description of Artificial Sequence: Synthetic oligonucleotide
  misc_feature 1..20: note = Target: FXN; (+) strand; PAM type: YTN; PAM sequence: CTA
  source 1..20: mol_type = other DNA
ctaaaaatataaaaattagc

SEQ ID NO: 35415 - DNA, 20 bp, synthetic construct
  misc_feature 1..20: note = Description of Artificial Sequence: Synthetic oligonucleotide
  misc_feature 1..20: note = Target: FXN; (+) strand; PAM type: YTN; PAM sequence: CTA
  source 1..20: mol_type = other DNA
aaaatataaaaattagccag

SEQ ID NO: 35416 - DNA, 20 bp, synthetic construct
  misc_feature 1..20: note = Description of Artificial Sequence: Synthetic oligonucleotide
  misc_feature 1..20: note = Target: FXN; (+) strand; PAM type: YTN; PAM sequence: TTA
  source 1..20: mol_type = other DNA
gccaggtgtggtggcacacg

SEQ ID NO: 35417 - DNA, 20 bp, synthetic construct
  misc_feature 1..20: note = Description of Artificial Sequence: Synthetic oligonucleotide
  misc_feature 1..20: note = Target: FXN; (+) strand; PAM type: YTN; PAM sequence: CTA
  source 1..20: mol_type = other DNA
tagtcccaactacttggaag

SEQ ID NO: 35418 - DNA, 20 bp, synthetic construct
  misc_feature 1..20: note = Description of Artificial Sequence: Synthetic oligonucleotide
  misc_feature 1..20: note = Target: FXN; (+) strand; PAM type: YTN; PAM sequence: CTA
  source 1..20: mol_type = other DNA
cttggaaggctgaggttgag

SEQ ID NO: 35419 - DNA, 20 bp, synthetic construct
  misc_feature 1..20: note = Description of Artificial Sequence: Synthetic oligonucleotide
  misc_feature 1..20: note = Target: FXN; (+) strand; PAM type: YTN; PAM sequence: CTT
  source 1..20: mol_type = other DNA
ggaaggctgaggttgagcct

SEQ ID NO: 35420 - DNA, 20 bp, synthetic construct
  misc_feature 1..20: note = Description of Artificial Sequence: Synthetic oligonucleotide
  misc_feature 1..20: note = Target: FXN; (+) strand; PAM type: YTN; PAM sequence: TTG
  source 1..20: mol_type = other DNA
gaaggctgaggttgagcctc

SEQ ID NO: 35421 - DNA, 20 bp, synthetic construct
  misc_feature 1..20: note = Description of Artificial Sequence: Synthetic oligonucleotide
  misc_feature 1..20: note = Target: FXN; (+) strand; PAM type: YTN; PAM sequence: CTG
  source 1..20: mol_type = other DNA
aggttgagcctcagcctgag

SEQ ID NO: 35422 - DNA, 20 bp, synthetic construct
  misc_feature 1..20: note = Description of Artificial Sequence: Synthetic oligonucleotide
  misc_feature 1..20: note = Target: FXN; (+) strand; PAM type: YTN; PAM sequence: TTG
  source 1..20: mol_type = other DNA
agcctcagcctgagcccagg

SEQ ID NO: 35423 - DNA, 20 bp, synthetic construct
  misc_feature 1..20: note = Description of Artificial Sequence: Synthetic oligonucleotide
  misc_feature 1..20: note = Target: FXN; (+) strand; PAM type: YTN; PAM sequence: CTC
  source 1..20: mol_type = other DNA
agcctgagcccaggaggtgg

SEQ ID NO: 35424 - DNA, 20 bp, synthetic construct
  misc_feature 1..20: note = Description of Artificial Sequence: Synthetic oligonucleotide
  misc_feature 1..20: note = Target: FXN; (+) strand; PAM type: YTN; PAM sequence: CTG
  source 1..20: mol_type = other DNA
agcccaggaggtggaggttg

SEQ ID NO: 35425 - DNA, 20 bp, synthetic construct
  misc_feature 1..20: note = Description of Artificial Sequence: Synthetic oligonucleotide
  misc_feature 1..20: note = Target: FXN; (+) strand; PAM type: YTN; PAM sequence: TTG
  source 1..20: mol_type = other DNA
cagtgagccaagatcgcgcc

SEQ ID NO: 35426 - DNA, 20 bp, synthetic construct
  misc_feature 1..20: note = Description of Artificial Sequence: Synthetic oligonucleotide
  misc_feature 1..20: note = Target: FXN; (+) strand; PAM type: YTN; PAM sequence: CTG
  source 1..20: mol_type = other DNA
cactccagcctgggcaacag

SEQ ID NO: 35427 - DNA, 20 bp, synthetic construct
  misc_feature 1..20: note = Description of Artificial Sequence: Synthetic oligonucleotide
  misc_feature 1..20: note = Target: FXN; (+) strand; PAM type: YTN; PAM sequence: CTC
  source 1..20: mol_type = other DNA
cagcctgggcaacagggcca

SEQ ID NO: 35428 - DNA, 20 bp, synthetic construct
  misc_feature 1..20: note = Description of Artificial Sequence: Synthetic oligonucleotide
  misc_feature 1..20: note = Target: FXN; (+) strand; PAM type: YTN; PAM sequence: CTG
  source 1..20: mol_type = other DNA
ggcaacagggccagaccctg

SEQ ID NO: 35429 - DNA, 20 bp, synthetic construct
  misc_feature 1..20: note = Description of Artificial Sequence: Synthetic oligonucleotide
  misc_feature 1..20: note = Target: FXN; (+) strand; PAM type: YTN; PAM sequence: CTG
  source 1..20: mol_type = other DNA
tcccaaaaaaaaaaaaaaag

SEQ ID NO: 35430 - DNA, 20 bp, synthetic construct
  misc_feature 1..20: note = Description of Artificial Sequence: Synthetic oligonucleotide
  misc_feature 1..20: note = Target: FXN; (+) strand; PAM type: YTN; PAM sequence: CTT
  source 1..20: mol_type = other DNA
atgttagcatccttgtaagt

SEQ ID NO: 35431 - DNA, 20 bp, synthetic construct
  misc_feature 1..20: note = Description of Artificial Sequence: Synthetic oligonucleotide
  misc_feature 1..20: note = Target: FXN; (+) strand; PAM type: YTN; PAM sequence: TTA
  source 1..20: mol_type = other DNA
tgttagcatccttgtaagtg

SEQ ID NO: 35432 - DNA, 20 bp, synthetic construct
  misc_feature 1..20: note = Description of Artificial Sequence: Synthetic oligonucleotide
  misc_feature 1..20: note = Target: FXN; (+) strand; PAM type: YTN; PAM sequence: TTA
  source 1..20: mol_type = other DNA
gcatccttgtaagtgagcct

SEQ ID NO: 35433 - DNA, 20 bp, synthetic construct
  misc_feature 1..20: note = Description of Artificial Sequence: Synthetic oligonucleotide
  misc_feature 1..20: note = Target: FXN; (+) strand; PAM type: YTN; PAM sequence: CTT
  source 1..20: mol_type = other DNA
gtaagtgagcctttcctgat

SEQ ID NO: 35434 - DNA, 20 bp, synthetic construct
  misc_feature 1..20: note = Description of Artificial Sequence: Synthetic oligonucleotide
  misc_feature 1..20: note = Target: FXN; (+) strand; PAM type: YTN; PAM sequence: TTG
  source 1..20: mol_type = other DNA
taagtgagcctttcctgata

SEQ ID NO: 35435 - DNA, 20 bp, synthetic construct
  misc_feature 1..20: note = Description of Artificial Sequence: Synthetic oligonucleotide
  misc_feature 1..20: note = Target: FXN; (+) strand; PAM type: YTN; PAM sequence: CTT
  source 1..20: mol_type = other DNA
tcctgatattttgcagcctg

SEQ ID NO: 35436 - DNA, 20 bp, synthetic construct
  misc_feature 1..20: note = Description of Artificial Sequence: Synthetic oligonucleotide
  misc_feature 1..20: note = Target: FXN; (+) strand; PAM type: YTN; PAM sequence: TTT
  source 1..20: mol_type = other DNA
cctgatattttgcagcctgt

SEQ ID NO: 35437 - DNA, 20 bp, synthetic construct
  misc_feature 1..20: note = Description of Artificial Sequence: Synthetic oligonucleotide
  misc_feature 1..20: note = Target: FXN; (+) strand; PAM type: YTN; PAM sequence: TTC
  source 1..20: mol_type = other DNA
ctgatattttgcagcctgtc

SEQ ID NO: 35438 - DNA, 20 bp, synthetic construct
  misc_feature 1..20: note = Description of Artificial Sequence: Synthetic oligonucleotide
  misc_feature 1..20: note = Target: FXN; (+) strand; PAM type: YTN; PAM sequence: CTG
  source 1..20: mol_type = other DNA
atattttgcagcctgtctca

SEQ ID NO: 35439 - DNA, 20 bp, synthetic construct
  misc_feature 1..20: note = Description of Artificial Sequence: Synthetic oligonucleotide
  misc_feature 1..20: note = Target: FXN; (+) strand; PAM type: YTN; PAM sequence: TTT
  source 1..20: mol_type = other DNA
tgcagcctgtctcattctca

SEQ ID NO: 35440 - DNA, 20 bp, synthetic construct
  misc_feature 1..20: note = Description of Artificial Sequence: Synthetic oligonucleotide
  misc_feature 1..20: note = Target: FXN; (+) strand; PAM type: YTN; PAM sequence: TTT
  source 1..20: mol_type = other DNA
gcagcctgtctcattctcag

SEQ ID NO: 35441 - DNA, 20 bp, synthetic construct
  misc_feature 1..20: note = Description of Artificial Sequence: Synthetic oligonucleotide
  misc_feature 1..20: note = Target: FXN; (+) strand; PAM type: YTN; PAM sequence: TTG
  source 1..20: mol_type = other DNA
cagcctgtctcattctcagt

SEQ ID NO: 35442 - DNA, 20 bp, synthetic construct
  misc_feature 1..20: note = Description of Artificial Sequence: Synthetic oligonucleotide
  misc_feature 1..20: note = Target: FXN; (+) strand; PAM type: YTN; PAM sequence: CTG
  source 1..20: mol_type = other DNA
tctcattctcagtagaaaag

SEQ ID NO: 35443 - DNA, 20 bp, synthetic construct
  misc_feature 1..20: note = Description of Artificial Sequence: Synthetic oligonucleotide
  misc_feature 1..20: note = Target: FXN; (+) strand; PAM type: YTN; PAM sequence: CTC
  source 1..20: mol_type = other DNA
attctcagtagaaaagttta

SEQ ID NO: 35444 - DNA, 20 bp, synthetic construct
  misc_feature 1..20: note = Description of Artificial Sequence: Synthetic oligonucleotide
  misc_feature 1..20: note = Target: FXN; (+) strand; PAM type: YTN; PAM sequence: TTC
  source 1..20: mol_type = other DNA
tcagtagaaaagtttactct

SEQ ID NO: 35445 - DNA, 20 bp, synthetic construct
  misc_feature 1..20: note = Description of Artificial Sequence: Synthetic oligonucleotide
  misc_feature 1..20: note = Target: FXN; (+) strand; PAM type: YTN; PAM sequence: CTC
  source 1..20: mol_type = other DNA
agtagaaaagtttactctag

SEQ ID NO: 35446 - DNA, 20 bp, synthetic construct
  misc_feature 1..20: note = Description of Artificial Sequence: Synthetic oligonucleotide
  misc_feature 1..20: note = Target: FXN; (+) strand; PAM type: YTN; PAM sequence: TTT
  source 1..20: mol_type = other DNA
actctagttacataacttct

SEQ ID NO: 35447 - DNA, 20 bp, synthetic construct
  misc_feature 1..20: note = Description of Artificial Sequence: Synthetic oligonucleotide
  misc_feature 1..20: note = Target: FXN; (+) strand; PAM type: YTN; PAM sequence: TTA
  source 1..20: mol_type = other DNA
ctctagttacataacttctc

SEQ ID NO: 35448 - DNA, 20 bp, synthetic construct
  misc_feature 1..20: note = Description of Artificial Sequence: Synthetic oligonucleotide
  misc_feature 1..20: note = Target: FXN; (+) strand; PAM type: YTN; PAM sequence: CTC
  source 1..20: mol_type = other DNA
tagttacataacttctccct

SEQ ID NO: 35449 - DNA, 20 bp, synthetic construct
  misc_feature 1..20: note = Description of Artificial Sequence: Synthetic oligonucleotide
  misc_feature 1..20: note = Target: FXN; (+) strand; PAM type: YTN; PAM sequence: CTA
  source 1..20: mol_type = other DNA
gttacataacttctccctgc

SEQ ID NO: 35450 - DNA, 20 bp, synthetic construct
  misc_feature 1..20: note = Description of Artificial Sequence: Synthetic oligonucleotide
  misc_feature 1..20: note = Target: FXN; (+) strand; PAM type: YTN; PAM sequence: TTA
  source 1..20: mol_type = other DNA
cataacttctccctgctgac

SEQ ID NO: 35451 - DNA, 20 bp, synthetic construct
  misc_feature 1..20: note = Description of Artificial Sequence: Synthetic oligonucleotide
  misc_feature 1..20: note = Target: FXN; (+) strand; PAM type: YTN; PAM sequence: CTT
  source 1..20: mol_type = other DNA
ctccctgctgacaatttgga

SEQ ID NO: 35452 - DNA, 20 bp, synthetic construct
  misc_feature 1..20: note = Description of Artificial Sequence: Synthetic oligonucleotide
  misc_feature 1..20: note = Target: FXN; (+) strand; PAM type: YTN; PAM sequence: TTC
  source 1..20: mol_type = other DNA
tccctgctgacaatttggat

SEQ ID NO: 35453 - DNA, 20 bp, synthetic construct
  misc_feature 1..20: note = Description of Artificial Sequence: Synthetic oligonucleotide
  misc_feature 1..20: note = Target: FXN; (+) strand; PAM type: YTN; PAM sequence: CTC
  source 1..20: mol_type = other DNA
cctgctgacaatttggatac

SEQ ID NO: 35454 - DNA, 20 bp, synthetic construct
  misc_feature 1..20: note = Description of Artificial Sequence: Synthetic oligonucleotide
  misc_feature 1..20: note = Target: FXN; (+) strand; PAM type: YTN; PAM sequence: CTG
  source 1..20: mol_type = other DNA
ctgacaatttggatactgta

SEQ ID NO: 35455 - DNA, 20 bp, synthetic construct
  misc_feature 1..20: note = Description of Artificial Sequence: Synthetic oligonucleotide
  misc_feature 1..20: note = Target: FXN; (+) strand; PAM type: YTN; PAM sequence: CTG
  source 1..20: mol_type = other DNA
acaatttggatactgtaagc

SEQ ID NO: 35456 - DNA, 20 bp, synthetic construct
  misc_feature 1..20: note = Description of Artificial Sequence: Synthetic oligonucleotide
  misc_feature 1..20: note = Target: FXN; (+) strand; PAM type: YTN; PAM sequence: TTT
  source 1..20: mol_type = other DNA
ggatactgtaagcaggcatc

SEQ ID NO: 35457 - DNA, 20 bp, synthetic construct
  misc_feature 1..20: note = Description of Artificial Sequence: Synthetic oligonucleotide
  misc_feature 1..20: note = Target: FXN; (+) strand; PAM type: YTN; PAM sequence: TTG
  source 1..20: mol_type = other DNA
gatactgtaagcaggcatca

SEQ ID NO: 35458 - DNA, 20 bp, synthetic construct
  misc_feature 1..20: note = Description of Artificial Sequence: Synthetic oligonucleotide
  misc_feature 1..20: note = Target: FXN; (+) strand; PAM type: YTN; PAM sequence: CTG
  source 1..20: mol_type = other DNA
taagcaggcatcaggatatt

SEQ ID NO: 35459 - DNA, 20 bp, synthetic construct
  misc_feature 1..20: note = Description of Artificial Sequence: Synthetic oligonucleotide
  misc_feature 1..20: note = Target: FXN; (+) strand; PAM type: YTN; PAM sequence: TTA
  source 1..20: mol_type = other DNA
agatctgaagtgagtagctt

SEQ ID NO: 35460 - DNA, 20 bp, synthetic construct
  misc_feature 1..20: note = Description of Artificial Sequence: Synthetic oligonucleotide
  misc_feature 1..20: note = Target: FXN; (+) strand; PAM type: YTN; PAM sequence: CTG
  source 1..20: mol_type = other DNA
aagtgagtagcttataactt

SEQ ID NO: 35461 - DNA, 20 bp, synthetic construct
  misc_feature 1..20: note = Description of Artificial Sequence: Synthetic oligonucleotide
  misc_feature 1..20: note = Target: FXN; (+) strand; PAM type: YTN; PAM sequence: CTT
  source 1..20: mol_type = other DNA
ataacttttccaaatccagc

SEQ ID NO: 35462 - DNA, 20 bp, synthetic construct
  misc_feature 1..20: note = Description of Artificial Sequence: Synthetic oligonucleotide
  misc_feature 1..20: note = Target: FXN; (+) strand; PAM type: YTN; PAM sequence: TTA
  source 1..20: mol_type = other DNA
taacttttccaaatccagcc

SEQ ID NO: 35463 - DNA, 20 bp, synthetic construct
  misc_feature 1..20: note = Description of Artificial Sequence: Synthetic oligonucleotide
  misc_feature 1..20: note = Target: FXN; (+) strand; PAM type: YTN; PAM sequence: CTT
  source 1..20: mol_type = other DNA
ttccaaatccagcctagaca

SEQ ID NO: 35464 - DNA, 20 bp, synthetic construct
  misc_feature 1..20: note = Description of Artificial Sequence: Synthetic oligonucleotide
  misc_feature 1..20: note = Target: FXN; (+) strand; PAM type: YTN; PAM sequence: TTT
  source 1..20: mol_type = other DNA
tccaaatccagcctagacag

SEQ ID NO: 35465 - DNA, 20 bp, synthetic construct
  misc_feature 1..20: note = Description of Artificial Sequence: Synthetic oligonucleotide
  misc_feature 1..20: note = Target: FXN; (+) strand; PAM type: YTN; PAM sequence: TTT
  source 1..20: mol_type = other DNA
ccaaatccagcctagacagt

SEQ ID NO: 35466 - DNA, 20 bp, synthetic construct
  misc_feature 1..20: note = Description of Artificial Sequence: Synthetic oligonucleotide
  misc_feature 1..20: note = Target: FXN; (+) strand; PAM type: YTN; PAM sequence: TTC
  source 1..20: mol_type = other DNA
caaatccagcctagacagtt

SEQ ID NO: 35467 - DNA, 20 bp, synthetic construct
  misc_feature 1..20: note = Description of Artificial Sequence: Synthetic oligonucleotide
  misc_feature 1..20: note = Target: FXN; (+) strand; PAM type: YTN; PAM sequence: CTA
  source 1..20: mol_type = other DNA
gacagttttcctctattaaa

SEQ ID NO: 35468 - DNA, 20 bp, synthetic construct
  misc_feature 1..20: note = Description of Artificial Sequence: Synthetic oligonucleotide
  misc_feature 1..20: note = Target: FXN; (+) strand; PAM type: YTN; PAM sequence: TTT
  source 1..20: mol_type = other DNA
tcctctattaaattattgcc

SEQ ID NO: 35469 - DNA, 20 bp, synthetic construct
  misc_feature 1..20: note = Description of Artificial Sequence: Synthetic oligonucleotide
  misc_feature 1..20: note = Target: FXN; (+) strand; PAM type: YTN; PAM sequence: TTT
  source 1..20: mol_type = other DNA
cctctattaaattattgccc

SEQ ID NO: 35470 - DNA, 20 bp, synthetic construct
  misc_feature 1..20: note = Description of Artificial Sequence: Synthetic oligonucleotide
  misc_feature 1..20: note = Target: FXN; (+) strand; PAM type: YTN; PAM sequence: TTC
  source 1..20: mol_type = other DNA
ctctattaaattattgccct

SEQ ID NO: 35471 - DNA, 20 bp, synthetic construct
  misc_feature 1..20: note = Description of Artificial Sequence: Synthetic oligonucleotide
  misc_feature 1..20: note = Target: FXN; (+) strand; PAM type: YTN; PAM sequence: CTC
  source 1..20: mol_type = other DNA
tattaaattattgccctgac

SEQ ID NO: 35472 - DNA, 20 bp, synthetic construct
  misc_feature 1..20: note = Description of Artificial Sequence: Synthetic oligonucleotide
  misc_feature 1..20: note = Target: FXN; (+) strand; PAM type: YTN; PAM sequence: CTA
  source 1..20: mol_type = other DNA
ttaaattattgccctgactt

SEQ ID NO: 35473 - DNA, 20 bp, synthetic construct
  misc_feature 1..20: note = Description of Artificial Sequence: Synthetic oligonucleotide
  misc_feature 1..20: note = Target: FXN; (+) strand; PAM type: YTN; PAM sequence: TTA
  source 1..20: mol_type = other DNA
aattattgccctgactttaa

SEQ ID NO: 35474 - DNA, 20 bp, synthetic construct
  misc_feature 1..20: note = Description of Artificial Sequence: Synthetic oligonucleotide
  misc_feature 1..20: note = Target: FXN; (+) strand; PAM type: YTN; PAM sequence: TTA
  source 1..20: mol_type = other DNA
ttgccctgactttaaaagaa

SEQ ID NO: 35475 - DNA, 20 bp, synthetic construct
  misc_feature 1..20: note = Description of Artificial Sequence: Synthetic oligonucleotide
  misc_feature 1..20: note = Target: FXN; (+) strand; PAM type: YTN; PAM sequence: TTG
  source 1..20: mol_type = other DNA
ccctgactttaaaagaagct

SEQ ID NO: 35476 - DNA, 20 bp, synthetic construct
  misc_feature 1..20: note = Description of Artificial Sequence: Synthetic oligonucleotide
  misc_feature 1..20: note = Target: FXN; (+) strand; PAM type: YTN; PAM sequence: CTG
  source 1..20: mol_type = other DNA
actttaaaagaagctacttt

SEQ ID NO: 35477 - DNA, 20 bp, synthetic construct
  misc_feature 1..20: note = Description of Artificial Sequence: Synthetic oligonucleotide
  misc_feature 1..20: note = Target: FXN; (+) strand; PAM type: YTN; PAM sequence: CTT
  source 1..20: mol_type = other DNA
taaaagaagctacttttgac

SEQ ID NO: 35478 - DNA, 20 bp, synthetic construct
  misc_feature 1..20: note = Description of Artificial Sequence: Synthetic oligonucleotide
  misc_feature 1..20: note = Target: FXN; (+) strand; PAM type: YTN; PAM sequence: TTT
  source 1..20: mol_type = other DNA
aaaagaagctacttttgacc

SEQ ID NO: 35479 - DNA, 20 bp, synthetic construct
  misc_feature 1..20: note = Description of Artificial Sequence: Synthetic oligonucleotide
  misc_feature 1..20: note = Target: FXN; (+) strand; PAM type: YTN; PAM sequence: TTA
  source 1..20: mol_type = other DNA
aaagaagctacttttgacct

SEQ ID NO: 35480 - DNA, 20 bp, synthetic construct
  misc_feature 1..20: note = Description of Artificial Sequence: Synthetic oligonucleotide
  misc_feature 1..20: note = Target: FXN; (+) strand; PAM type: YTN; PAM sequence: CTA
  source 1..20: mol_type = other DNA
cttttgaccttgtagcgttt

SEQ ID NO: 35481 - DNA, 20 bp, synthetic construct
  misc_feature 1..20: note = Description of Artificial Sequence: Synthetic oligonucleotide
  misc_feature 1..20: note = Target: FXN; (+) strand; PAM type: YTN; PAM sequence: CTT
  source 1..20: mol_type = other DNA
ttgaccttgtagcgtttgaa

SEQ ID NO: 35482 - DNA, 20 bp, synthetic construct
  misc_feature 1..20: note = Description of Artificial Sequence: Synthetic oligonucleotide
  misc_feature 1..20: note = Target: FXN; (+) strand; PAM type: YTN; PAM sequence: TTT
  source 1..20: mol_type = other DNA
tgaccttgtagcgtttgaac

SEQ ID NO: 35483 - DNA, 20 bp, synthetic construct
  misc_feature 1..20: note = Description of Artificial Sequence: Synthetic oligonucleotide
  misc_feature 1..20: note = Target: FXN; (+) strand; PAM type: YTN; PAM sequence: TTT
  source 1..20: mol_type = other DNA
gaccttgtagcgtttgaaca

SEQ ID NO: 35484 - DNA, 20 bp, synthetic construct
  misc_feature 1..20: note = Description of Artificial Sequence: Synthetic oligonucleotide
  misc_feature 1..20: note = Target: FXN; (+) strand; PAM type: YTN; PAM sequence: TTG
  source 1..20: mol_type = other DNA
accttgtagcgtttgaacaa

SEQ ID NO: 35485 - DNA, 20 bp, synthetic construct
  misc_feature 1..20: note = Description of Artificial Sequence: Synthetic oligonucleotide
  misc_feature 1..20: note = Target: FXN; (+) strand; PAM type: YTN; PAM sequence: CTT
  source 1..20: mol_type = other DNA
gtagcgtttgaacaagttgc

SEQ ID NO: 35486 - DNA, 20 bp, synthetic construct
  misc_feature 1..20: note = Description of Artificial Sequence: Synthetic oligonucleotide
  misc_feature 1..20: note = Target: FXN; (+) strand; PAM type: YTN; PAM sequence: TTG
  source 1..20: mol_type = other DNA
tagcgtttgaacaagttgca

SEQ ID NO: 35487 - DNA, 20 bp, synthetic construct
  misc_feature 1..20: note = Description of Artificial Sequence: Synthetic oligonucleotide
  misc_feature 1..20: note = Target: FXN; (+) strand; PAM type: YTN; PAM sequence: TTT
  source 1..20: mol_type = other DNA
gaacaagttgcactttgtct

SEQ ID NO: 35488 - DNA, 20 bp, synthetic construct
  misc_feature 1..20: note = Description of Artificial Sequence: Synthetic oligonucleotide
  misc_feature 1..20: note = Target: FXN; (+) strand; PAM type: YTN; PAM sequence: TTG
  source 1..20: mol_type = other DNA
aacaagttgcactttgtctt

SEQ ID NO: 35489 - DNA, 20 bp, synthetic construct
  misc_feature 1..20: note = Description of Artificial Sequence: Synthetic oligonucleotide
  misc_feature 1..20: note = Target: FXN; (+) strand; PAM type: YTN; PAM sequence: TTG
  source 1..20: mol_type = other DNA
cactttgtcttcaaagcaag

SEQ ID NO: 35490 - DNA, 20 bp, synthetic construct
  misc_feature 1..20: note = Description of Artificial Sequence: Synthetic oligonucleotide
  misc_feature 1..20: note = Target: FXN; (+) strand; PAM type: YTN; PAM sequence: CTT
  source 1..20: mol_type = other DNA
tgtcttcaaagcaagttaaa

SEQ ID NO: 35491 - DNA, 20 bp, synthetic construct
  misc_feature 1..20: note = Description of Artificial Sequence: Synthetic oligonucleotide
  misc_feature 1..20: note = Target: FXN; (+) strand; PAM type: YTN; PAM sequence: TTT
  source 1..20: mol_type = other DNA
gtcttcaaagcaagttaaag

SEQ ID NO: 35492 - DNA, 20 bp, synthetic construct
  misc_feature 1..20: note = Description of Artificial Sequence: Synthetic oligonucleotide
  misc_feature 1..20: note = Target: FXN; (+) strand; PAM type: YTN; PAM sequence: TTG
  source 1..20: mol_type = other DNA
tcttcaaagcaagttaaagt

SEQ ID NO: 35493 - DNA, 20 bp, synthetic construct
  misc_feature 1..20: note = Description of Artificial Sequence: Synthetic oligonucleotide
  misc_feature 1..20: note = Target: FXN; (+) strand; PAM type: YTN; PAM sequence: CTT
  source 1..20: mol_type = other DNA
caaagcaagttaaagtttga

SEQ ID NO: 35494 - DNA, 20 bp, synthetic construct
  misc_feature 1..20: note = Description of Artificial Sequence: Synthetic oligonucleotide
  misc_feature 1..20: note = Target: FXN; (+) strand; PAM type: YTN; PAM sequence: TTC
  source 1..20: mol_type = other DNA
aaagcaagttaaagtttgac

SEQ ID NO: 35495 - DNA, 20 bp, synthetic construct
  misc_feature 1..20: note = Description of Artificial Sequence: Synthetic oligonucleotide
  misc_feature 1..20: note = Target: FXN; (+) strand; PAM type: YTN; PAM sequence: TTA
  source 1..20: mol_type = other DNA
aagtttgacctctacttgtt

SEQ ID NO: 35496 - DNA, 20 bp, synthetic construct
  misc_feature 1..20: note = Description of Artificial Sequence: Synthetic oligonucleotide
  misc_feature 1..20: note = Target: FXN; (+) strand; PAM type: YTN; PAM sequence: TTT
  source 1..20: mol_type = other DNA
gacctctacttgttttgagc

SEQ ID NO: 35497 - DNA, 20 bp, synthetic construct
  misc_feature 1..20: note = Description of Artificial Sequence: Synthetic oligonucleotide
  misc_feature 1..20: note = Target: FXN; (+) strand; PAM type: YTN; PAM sequence: TTG
  source 1..20: mol_type = other DNA
acctctacttgttttgagcc

SEQ ID NO: 35498 - DNA, 20 bp, synthetic construct
  misc_feature 1..20: note = Description of Artificial Sequence: Synthetic oligonucleotide
  misc_feature 1..20: note = Target: FXN; (+) strand; PAM type: YTN; PAM sequence: CTC
  source 1..20: mol_type = other DNA
tacttgttttgagcctctca

SEQ ID NO: 35499 - DNA, 20 bp, synthetic construct
  misc_feature 1..20: note = Description of Artificial Sequence: Synthetic oligonucleotide
  misc_feature 1..20: note = Target: FXN; (+) strand; PAM type: YTN; PAM sequence: CTA
  source 1..20: mol_type = other DNA
cttgttttgagcctctcagg

SEQ ID NO: 35500 - DNA, 20 bp, synthetic construct
  misc_feature 1..20: note = Description of Artificial Sequence: Synthetic oligonucleotide
  misc_feature 1..20: note = Target: FXN; (+) strand; PAM type: YTN; PAM sequence: CTT
  source 1..20: mol_type = other DNA
gttttgagcctctcaggtaa

SEQ ID NO: 35501 - DNA, 20 bp, synthetic construct
  misc_feature 1..20: note = Description of Artificial Sequence: Synthetic oligonucleotide
  misc_feature 1..20: note = Target: FXN; (+) strand; PAM type: YTN; PAM sequence: TTG
  source 1..20: mol_type = other DNA
ttttgagcctctcaggtaaa

SEQ ID NO: 35502 - DNA, 20 bp, synthetic construct
  misc_feature 1..20: note = Description of Artificial Sequence: Synthetic oligonucleotide
  misc_feature 1..20: note = Target: FXN; (+) strand; PAM type: YTN; PAM sequence: TTT
  source 1..20: mol_type = other DNA
tgagcctctcaggtaaaggg

SEQ ID NO: 35503 - DNA, 20 bp, synthetic construct
  misc_feature 1..20: note = Description of Artificial Sequence: Synthetic oligonucleotide
  misc_feature 1..20: note = Target: FXN; (+) strand; PAM type: YTN; PAM sequence: TTT
  source 1..20: mol_type = other DNA
gagcctctcaggtaaagggt

SEQ ID NO: 35504 - DNA, 20 bp, synthetic construct
  misc_feature 1..20: note = Description of Artificial Sequence: Synthetic oligonucleotide
  misc_feature 1..20: note = Target: FXN; (+) strand; PAM type: YTN; PAM sequence: TTG
  source 1..20: mol_type = other DNA
agcctctcaggtaaagggtt

SEQ ID NO: 35505 - DNA, 20 bp, synthetic construct
  misc_feature 1..20: note = Description of Artificial Sequence: Synthetic oligonucleotide
  misc_feature 1..20: note = Target: FXN; (+) strand; PAM type: YTN; PAM sequence: CTC
  source 1..20: mol_type = other DNA
tcaggtaaagggttatttga

SEQ ID NO: 35506 - DNA, 20 bp, synthetic construct
  misc_feature 1..20: note = Description of Artificial Sequence: Synthetic oligonucleotide
  misc_feature 1..20: note = Target: FXN; (+) strand; PAM type: YTN; PAM sequence: CTC
  source 1..20: mol_type = other DNA
aggtaaagggttatttgaat

SEQ ID NO: 35507 - DNA, 20 bp, synthetic construct
  misc_feature 1..20: note = Description of Artificial Sequence: Synthetic oligonucleotide
  misc_feature 1..20: note = Target: FXN; (+) strand; PAM type: YTN; PAM sequence: TTA
  source 1..20: mol_type = other DNA
tttgaattccctttgcaggt

SEQ ID NO: 35508 - DNA, 20 bp, synthetic construct
  misc_feature 1..20: note = Description of Artificial Sequence: Synthetic oligonucleotide
  misc_feature 1..20: note = Target: FXN; (+) strand; PAM type: YTN; PAM sequence: TTT
  source 1..20: mol_type = other DNA
gaattccctttgcaggttgg

SEQ ID NO: 35509 - DNA, 20 bp, synthetic construct
  misc_feature 1..20: note = Description of Artificial Sequence: Synthetic oligonucleotide
  misc_feature 1..20: note = Target: FXN; (+) strand; PAM type: YTN; PAM sequence: TTG
  source 1..20: mol_type = other DNA
aattccctttgcaggttggg

SEQ ID NO: 35510 - DNA, 20 bp, synthetic construct
  misc_feature 1..20: note = Description of Artificial Sequence: Synthetic oligonucleotide
  misc_feature 1..20: note = Target: FXN; (+) strand; PAM type: YTN; PAM sequence: TTC
  source 1..20: mol_type = other DNA
cctttgcaggttggggttgt

SEQ ID NO: 35511 - DNA, 20 bp, synthetic construct
  misc_feature 1..20: note = Description of Artificial Sequence: Synthetic oligonucleotide
  misc_feature 1..20: note = Target: FXN; (+) strand; PAM type: YTN; PAM sequence: CTT
  source 1..20: mol_type = other DNA
tgcaggttggggttgtgtac

SEQ ID NO: 35512 - DNA, 20 bp, synthetic construct
  misc_feature 1..20: note = Description of Artificial Sequence: Synthetic oligonucleotide
  misc_feature 1..20: note = Target: FXN; (+) strand; PAM type: YTN; PAM sequence: TTT
  source 1..20: mol_type = other DNA
gcaggttggggttgtgtacc

SEQ ID NO: 35513 - DNA, 20 bp, synthetic construct
  misc_feature 1..20: note = Description of Artificial Sequence: Synthetic oligonucleotide
  misc_feature 1..20: note = Target: FXN; (+) strand; PAM type: YTN; PAM sequence: TTG
  source 1..20: mol_type = other DNA
caggttggggttgtgtaccc

SEQ ID NO: 35514 - DNA, 20 bp, synthetic construct
  misc_feature 1..20: note = Description of Artificial Sequence: Synthetic oligonucleotide
  misc_feature 1..20: note = Target: FXN; (+) strand; PAM type: YTN; PAM sequence: TTG
  source 1..20: mol_type = other DNA
gggttgtgtaccctgtggag

SEQ ID NO: 35515 - DNA, 20 bp, synthetic construct
  misc_feature 1..20: note = Description of Artificial Sequence: Synthetic oligonucleotide
  misc_feature 1..20: note = Target: FXN; (+) strand; PAM type: YTN; PAM sequence: TTG
  source 1..20: mol_type = other DNA
tgtaccctgtggaggtggta

SEQ ID NO: 35516 - DNA, 20 bp, synthetic construct
  misc_feature 1..20: note = Description of Artificial Sequence: Synthetic oligonucleotide
  misc_feature 1..20: note = Target: FXN; (+) strand; PAM type: YTN; PAM sequence: CTG
  source 1..20: mol_type = other DNA
tggaggtggtagagtgttat

SEQ ID NO: 35517 - DNA, 20 bp, synthetic construct
  misc_feature 1..20: note = Description of Artificial Sequence: Synthetic oligonucleotide
  misc_feature 1..20: note = Target: FXN; (+) strand; PAM type: YTN; PAM sequence: TTA
  source 1..20: mol_type = other DNA
tatattgctgctccagggca

SEQ ID NO: 35518 - DNA, 20 bp, synthetic construct
  misc_feature 1..20: note = Description of Artificial Sequence: Synthetic oligonucleotide
  misc_feature 1..20: note = Target: FXN; (+) strand; PAM type: YTN; PAM sequence: TTG
  source 1..20: mol_type = other DNA
ctgctccagggcatttaatc

SEQ ID NO: 35519 - DNA, 20 bp, synthetic construct
  misc_feature 1..20: note = Description of Artificial Sequence: Synthetic oligonucleotide
  misc_feature 1..20: note = Target: FXN; (+) strand; PAM type: YTN; PAM sequence: CTG
  source 1..20: mol_type = other DNA
ctccagggcatttaatccct

SEQ ID NO: 35520 - DNA, 20 bp, synthetic construct
  misc_feature 1..20: note = Description of Artificial Sequence: Synthetic oligonucleotide
  misc_feature 1..20: note = Target: FXN; (+) strand; PAM type: YTN; PAM sequence: CTC
  source 1..20: mol_type = other DNA
cagggcatttaatccctcct

SEQ ID NO: 35521 - DNA, 20 bp, synthetic construct
  misc_feature 1..20: note = Description of Artificial Sequence: Synthetic oligonucleotide
  misc_feature 1..20: note = Target: FXN; (+) strand; PAM type: YTN; PAM sequence: TTT
  source 1..20: mol_type = other DNA
aatccctcctgccttttcca

SEQ ID NO: 35522 - DNA, 20 bp, synthetic construct
  misc_feature 1..20: note = Description of Artificial Sequence: Synthetic oligonucleotide
  misc_feature 1..20: note = Target: FXN; (+) strand; PAM type: YTN; PAM sequence: TTA
  source 1..20: mol_type = other DNA
atccctcctgccttttccat

SEQ ID NO: 35523 - DNA, 20 bp, synthetic construct
  misc_feature 1..20: note = Description of Artificial Sequence: Synthetic oligonucleotide
  misc_feature 1..20: note = Target: FXN; (+) strand; PAM type: YTN; PAM sequence: CTC
  source 1..20: mol_type = other DNA
ctgccttttccattgatgtg

SEQ ID NO: 35524 - DNA, 20 bp, synthetic construct
  misc_feature 1..20: note = Description of Artificial Sequence: Synthetic oligonucleotide
  misc_feature 1..20: note = Target: FXN; (+) strand; PAM type: YTN; PAM sequence: CTG
  source 1..20: mol_type = other DNA
ccttttccattgatgtgctt

SEQ ID NO: 35525 - DNA, 20 bp, synthetic construct
  misc_feature 1..20: note = Description of Artificial Sequence: Synthetic oligonucleotide
  misc_feature 1..20: note = Target: FXN; (+) strand; PAM type: YTN; PAM sequence: CTT
  source 1..20: mol_type = other DNA
ttccattgatgtgctttcaa

SEQ ID NO: 35526 - DNA, 20 bp, synthetic construct
  misc_feature 1..20: note = Description of Artificial Sequence: Synthetic oligonucleotide
  misc_feature 1..20: note = Target: FXN; (+) strand; PAM type: YTN; PAM sequence: TTT
  source 1..20: mol_type = other DNA
tccattgatgtgctttcaat

SEQ ID NO: 35527 - DNA, 20 bp, synthetic construct
  misc_feature 1..20: note = Description of Artificial Sequence: Synthetic oligonucleotide
  misc_feature 1..20: note = Target: FXN; (+) strand; PAM type: YTN; PAM sequence: TTT
  source 1..20: mol_type = other DNA
ccattgatgtgctttcaatc

SEQ ID NO: 35528 - DNA, 20 bp, synthetic construct
  misc_feature 1..20: note = Description of Artificial Sequence: Synthetic oligonucleotide
  misc_feature 1..20: note = Target: FXN; (+) strand; PAM type: YTN; PAM sequence: TTC
  source 1..20: mol_type = other DNA
cattgatgtgctttcaatct

SEQ ID NO: 35529 - DNA, 20 bp, synthetic construct
  misc_feature 1..20: note = Description of Artificial Sequence: Synthetic oligonucleotide
  misc_feature 1..20: note = Target: FXN; (+) strand; PAM type: YTN; PAM sequence: TTG
  source 1..20: mol_type = other DNA
atgtgctttcaatctagagg

SEQ ID NO: 35530 - DNA, 20 bp, synthetic construct
  misc_feature 1..20: note = Description of Artificial Sequence: Synthetic oligonucleotide
  misc_feature 1..20: note = Target: FXN; (+) strand; PAM type: YTN; PAM sequence: CTT
  source 1..20: mol_type = other DNA
tcaatctagaggaataaaag

SEQ ID NO: 35531 - DNA, 20 bp, synthetic construct
  misc_feature 1..20: note = Description of Artificial Sequence: Synthetic oligonucleotide
  misc_feature 1..20: note = Target: FXN; (+) strand; PAM type: YTN; PAM sequence: TTT
  source 1..20: mol_type = other DNA
caatctagaggaataaaaga

SEQ ID NO: 35532 - DNA, 20 bp, synthetic construct
  misc_feature 1..20: note = Description of Artificial Sequence: Synthetic oligonucleotide
  misc_feature 1..20: note = Target: FXN; (+) strand; PAM type: YTN; PAM sequence: TTC
  source 1..20: mol_type = other DNA
aatctagaggaataaaagat

SEQ ID NO: 35533 - DNA, 20 bp, synthetic construct
  misc_feature 1..20: note = Description of Artificial Sequence: Synthetic oligonucleotide
  misc_feature 1..20: note = Target: FXN; (+) strand; PAM type: YTN; PAM sequence: CTA
  source 1..20: mol_type = other DNA
gaggaataaaagattgtgtt

SEQ ID NO: 35534 - DNA, 20 bp, synthetic construct
  misc_feature 1..20: note = Description of Artificial Sequence: Synthetic oligonucleotide
  misc_feature 1..20: note = Target: FXN; (+) strand; PAM type: YTN; PAM sequence: TTG
  source 1..20: mol_type = other DNA
tgttggagacacaatgtggc

SEQ ID NO: 35535 - DNA, 20 bp, synthetic construct
  misc_feature 1..20: note = Description of Artificial Sequence: Synthetic oligonucleotide
  misc_feature 1..20: note = Target: FXN; (+) strand; PAM type: YTN; PAM sequence: TTG
  source 1..20: mol_type = other DNA
gagacacaatgtggcctgca

SEQ ID NO: 35536 - DNA, 20 bp, synthetic construct
  misc_feature 1..20: note = Description of Artificial Sequence: Synthetic oligonucleotide
  misc_feature 1..20: note = Target: FXN; (+) strand; PAM type: YTN; PAM sequence: CTG
  source 1..20: mol_type = other DNA
catagcatctgaaagcctga

SEQ ID NO: 35537 - DNA, 20 bp, synthetic construct
  misc_feature 1..20: note = Description of Artificial Sequence: Synthetic oligonucleotide
  misc_feature 1..20: note = Target: FXN; (+) strand; PAM type: YTN; PAM sequence: CTG
  source 1..20: mol_type = other DNA
aaagcctgagaacatgcagg

SEQ ID NO: 35538 - DNA, 20 bp, synthetic construct
  misc_feature 1..20: note = Description of Artificial Sequence: Synthetic oligonucleotide
  misc_feature 1..20: note = Target: FXN; (+) strand; PAM type: YTN; PAM sequence: CTG
  source 1..20: mol_type = other DNA
agaacatgcagggagagaca

SEQ ID NO: 35539 - DNA, 20 bp, synthetic construct
  misc_feature 1..20: note = Description of Artificial Sequence: Synthetic oligonucleotide
  misc_feature 1..20: note = Target: FXN; (+) strand; PAM type: YTN; PAM sequence: CTC
  source 1..20: mol_type = other DNA
atccctcagcagcctggctg

SEQ ID NO: 35540 - DNA, 20 bp, synthetic construct
  misc_feature 1..20: note = Description of Artificial Sequence: Synthetic oligonucleotide
  misc_feature 1..20: note = Target: FXN; (+) strand; PAM type: YTN; PAM sequence: CTC
  source 1..20: mol_type = other DNA
agcagcctggctgctgttga

SEQ ID NO: 35541 - DNA, 20 bp, synthetic construct
  misc_feature 1..20: note = Description of Artificial Sequence: Synthetic oligonucleotide
  misc_feature 1..20: note = Target: FXN; (+) strand; PAM type: YTN; PAM sequence: CTG
  source 1..20: mol_type = other DNA
gctgctgttgaagtggttgt

SEQ ID NO: 35542 - DNA, 20 bp, synthetic construct
  misc_feature 1..20: note = Description of Artificial Sequence: Synthetic oligonucleotide
  misc_feature 1..20: note = Target: FXN; (+) strand; PAM type: YTN; PAM sequence: CTG
  source 1..20: mol_type = other DNA
ctgttgaagtggttgtaaga

SEQ ID NO: 35543 - DNA, 20 bp, synthetic construct
  misc_feature 1..20: note = Description of Artificial Sequence: Synthetic oligonucleotide
  misc_feature 1..20: note = Target: FXN; (+) strand; PAM type: YTN; PAM sequence: CTG
  source 1..20: mol_type = other DNA
ttgaagtggttgtaagaaag

SEQ ID NO: 35544 - DNA, 20 bp, synthetic construct
  misc_feature 1..20: note = Description of Artificial Sequence: Synthetic oligonucleotide
  misc_feature 1..20: note = Target: FXN; (+) strand; PAM type: YTN; PAM sequence: TTG
  source 1..20: mol_type = other DNA
aagtggttgtaagaaagtaa

SEQ ID NO: 35545 - DNA, 20 bp, synthetic construct
  misc_feature 1..20: note = Description of Artificial Sequence: Synthetic oligonucleotide
  misc_feature 1..20: note = Target: FXN; (+) strand; PAM type: YTN; PAM sequence: TTG
  source 1..20: mol_type = other DNA
taagaaagtaaaagagaaat

SEQ ID NO: 35546 - DNA, 20 bp, synthetic construct
  misc_feature 1..20: note = Description of Artificial Sequence: Synthetic oligonucleotide
  misc_feature 1..20: note = Target: FXN; (+) strand; PAM type: YTN; PAM sequence: TTC
  source 1..20: mol_type = other DNA
tcagatccagtcattcatta

SEQ ID NO: 35547 - DNA, 20 bp, synthetic construct
  misc_feature 1..20: note = Description of Artificial Sequence: Synthetic oligonucleotide
  misc_feature 1..20: note = Target: FXN; (+) strand; PAM type: YTN; PAM sequence: CTC
  source 1..20: mol_type = other DNA
agatccagtcattcattagc

SEQ ID NO: 35548 - DNA, 20 bp, synthetic construct
  misc_feature 1..20: note = Description of Artificial Sequence: Synthetic oligonucleotide
  misc_feature 1..20: note = Target: FXN; (+) strand; PAM type: YTN; PAM sequence: TTC
  source 1..20: mol_type = other DNA
attagcacttccaaagagag

SEQ ID NO: 35549 - DNA, 20 bp, synthetic construct
  misc_feature 1..20: note = Description of Artificial Sequence: Synthetic oligonucleotide
  misc_feature 1..20: note = Target: FXN; (+) strand; PAM type: YTN; PAM sequence: TTA
  source 1..20: mol_type = other DNA
gcacttccaaagagagcatg

SEQ ID NO: 35550 - DNA, 20 bp, synthetic construct
  misc_feature 1..20: note = Description of Artificial Sequence: Synthetic oligonucleotide
  misc_feature 1..20: note = Target: FXN; (+) strand; PAM type: YTN; PAM sequence: CTT
  source 1..20: mol_type = other DNA
ccaaagagagcatgttgact

SEQ ID NO: 35551 - DNA, 20 bp, synthetic construct
  misc_feature 1..20: note = Description of Artificial Sequence: Synthetic oligonucleotide
  misc_feature 1..20: note = Target: FXN; (+) strand; PAM type: YTN; PAM sequence: TTC
  source 1..20: mol_type = other DNA
caaagagagcatgttgactg

SEQ ID NO: 35552 - DNA, 20 bp, synthetic construct
  misc_feature 1..20: note = Description of Artificial Sequence: Synthetic oligonucleotide
  misc_feature 1..20: note = Target: FXN; (+) strand; PAM type: YTN; PAM sequence: TTG
  source 1..20: mol_type = other DNA
actgtgaattgggaaagggc

SEQ ID NO: 35553 - DNA, 20 bp, synthetic construct
  misc_feature 1..20: note = Description of Artificial Sequence: Synthetic oligonucleotide
  misc_feature 1..20: note = Target: FXN; (+) strand; PAM type: YTN; PAM sequence: CTG
  source 1..20: mol_type = other DNA
tgaattgggaaagggccaga

SEQ ID NO: 35554 - DNA, 20 bp, synthetic construct
  misc_feature 1..20: note = Description of Artificial Sequence: Synthetic oligonucleotide
  misc_feature 1..20: note = Target: FXN; (+) strand; PAM type: YTN; PAM sequence: TTG
  source 1..20: mol_type = other DNA
ggaaagggccagataaaact

SEQ ID NO: 35555 - DNA, 20 bp, synthetic construct
  misc_feature 1..20: note = Description of Artificial Sequence: Synthetic oligonucleotide
  misc_feature 1..20: note = Target: FXN; (+) strand; PAM type: YTN; PAM sequence: CTA
  source 1..20: mol_type = other DNA
gcatagaattctttgaaaga

SEQ ID NO: 35556 - DNA, 20 bp, synthetic construct
  misc_feature 1..20: note = Description of Artificial Sequence: Synthetic oligonucleotide
  misc_feature 1..20: note = Target: FXN; (+) strand; PAM type: YTN; PAM sequence: TTC
  source 1..20: mol_type = other DNA
tttgaaagactaacggtatt

SEQ ID NO: 35557 - DNA, 20 bp, synthetic construct
  misc_feature 1..20: note = Description of Artificial Sequence: Synthetic oligonucleotide
  misc_feature 1..20: note = Target: FXN; (+) strand; PAM type: YTN; PAM sequence: CTT
  source 1..20: mol_type = other DNA
tgaaagactaacggtatttg

SEQ ID NO: 35558 - DNA, 20 bp, synthetic construct
  misc_feature 1..20: note = Description of Artificial Sequence: Synthetic oligonucleotide
  misc_feature 1..20: note = Target: FXN; (+) strand; PAM type: YTN; PAM sequence: TTT
  source 1..20: mol_type = other DNA
gaaagactaacggtatttgc

SEQ ID NO: 35559 - DNA, 20 bp, synthetic construct
  misc_feature 1..20: note = Description of Artificial Sequence: Synthetic oligonucleotide
  misc_feature 1..20: note = Target: FXN; (+) strand; PAM type: YTN; PAM sequence: TTG
  source 1..20: mol_type = other DNA
aaagactaacggtatttgca

SEQ ID NO: 35560 - DNA, 20 bp, synthetic construct
  misc_feature 1..20: note = Description of Artificial Sequence: Synthetic oligonucleotide
  misc_feature 1..20: note = Target: FXN; (+) strand; PAM type: YTN; PAM sequence: CTA
  source 1..20: mol_type = other DNA
acggtatttgcattttttaa

SEQ ID NO: 35561 - DNA, 20 bp, synthetic construct
  misc_feature 1..20: note = Description of Artificial Sequence: Synthetic oligonucleotide
  misc_feature 1..20: note = Target: FXN; (+) strand; PAM type: YTN; PAM sequence: TTT
  source 1..20: mol_type = other DNA
gcattttttaaaaattataa

SEQ ID NO: 35562 - DNA, 20 bp, synthetic construct
  misc_feature 1..20: note = Description of Artificial Sequence: Synthetic oligonucleotide
  misc_feature 1..20: note = Target: FXN; (+) strand; PAM type: YTN; PAM sequence: TTG
  source 1..20: mol_type = other DNA
cattttttaaaaattataac

SEQ ID NO: 35563 - DNA, 20 bp, synthetic construct
  misc_feature 1..20: note = Description of Artificial Sequence: Synthetic oligonucleotide
  misc_feature 1..20: note = Target: FXN; (+) strand; PAM type: YTN; PAM sequence: TTT
  source 1..20: mol_type = other DNA
tttaaaaattataaccttac

SEQ ID NO: 35564 - DNA, 20 bp, synthetic construct
  misc_feature 1..20: note = Description of Artificial Sequence: Synthetic oligonucleotide
  misc_feature 1..20: note = Target: FXN; (+) strand; PAM type: YTN; PAM sequence: TTT
  source 1..20: mol_type = other DNA
ttaaaaattataaccttact

SEQ ID NO: 35565 - DNA, 20 bp, synthetic construct
  misc_feature 1..20: note = Description of Artificial Sequence: Synthetic oligonucleotide
  misc_feature 1..20: note = Target: FXN; (+) strand; PAM type: YTN; PAM sequence: TTT
  source 1..20: mol_type = other DNA
taaaaattataaccttactc

SEQ ID NO: 35566 - DNA, 20 bp, synthetic construct
  misc_feature 1..20: note = Description of Artificial Sequence: Synthetic oligonucleotide
  misc_feature 1..20: note = Target: FXN; (+) strand; PAM type: YTN; PAM sequence: TTT
  source 1..20: mol_type = other DNA
aaaaattataaccttactct

SEQ ID NO: 35567 - DNA, 20 bp, synthetic construct
  misc_feature 1..20: note = Description of Artificial Sequence: Synthetic oligonucleotide
  misc_feature 1..20: note = Target: FXN; (+) strand; PAM type: YTN; PAM sequence: TTA
  source 1..20: mol_type = other DNA
aaaattataaccttactcta

SEQ ID NO: 35568 - DNA, 20 bp, synthetic construct
  misc_feature 1..20: note = Description of Artificial Sequence: Synthetic oligonucleotide
  misc_feature 1..20: note = Target: FXN; (+) strand; PAM type: YTN; PAM sequence: TTA
  source 1..20: mol_type = other DNA
taaccttactctacccccta

SEQ ID NO: 35569 - DNA, 20 bp, synthetic construct
  misc_feature 1..20: note = Description of Artificial Sequence: Synthetic oligonucleotide
  misc_feature 1..20: note = Target: FXN; (+) strand; PAM type: YTN; PAM sequence: CTT
  source 1..20: mol_type = other DNA
actctaccccctaacattga

SEQ ID NO: 35570 - DNA, 20 bp, synthetic construct
  misc_feature 1..20: note = Description of Artificial Sequence: Synthetic oligonucleotide
  misc_feature 1..20: note = Target: FXN; (+) strand; PAM type: YTN; PAM sequence: TTA
  source 1..20: mol_type = other DNA
ctctaccccctaacattgac

SEQ ID NO: 35571 - DNA, 20 bp, synthetic construct
  misc_feature 1..20: note = Description of Artificial Sequence: Synthetic oligonucleotide
  misc_feature 1..20: note = Target: FXN; (+) strand; PAM type: YTN; PAM sequence: CTC
  source 1..20: mol_type = other DNA
taccccctaacattgacatc

SEQ ID NO: 35572 - DNA, 20 bp, synthetic construct
  misc_feature 1..20: note = Description of Artificial Sequence: Synthetic oligonucleotide
  misc_feature 1..20: note = Target: FXN; (+) strand; PAM type: YTN; PAM sequence: CTA
  source 1..20: mol_type = other DNA
ccccctaacattgacatcat

SEQ ID NO: 35573 - DNA, 20 bp, synthetic construct
  misc_feature 1..20: note = Description of Artificial Sequence: Synthetic oligonucleotide
  misc_feature 1..20: note = Target: FXN; (+) strand; PAM type: YTN; PAM sequence: CTA
  source 1..20: mol_type = other DNA
acattgacatcatttttagg

SEQ ID NO: 35574 - DNA, 20 bp, synthetic construct
  misc_feature 1..20: note = Description of Artificial Sequence: Synthetic oligonucleotide
  misc_feature 1..20: note = Target: FXN; (+) strand; PAM type: YTN; PAM sequence: TTG
  source 1..20: mol_type = other DNA
acatcatttttaggtaatta

SEQ ID NO: 35575 - DNA, 20 bp, synthetic construct
  misc_feature 1..20: note = Description of Artificial Sequence: Synthetic oligonucleotide
  misc_feature 1..20: note = Target: FXN; (+) strand; PAM type: YTN; PAM sequence: TTT
  source 1..20: mol_type = other DNA
ttaggtaattaatattttcc

SEQ ID NO: 35576 - DNA, 20 bp, synthetic construct
  misc_feature 1..20: note = Description of Artificial Sequence: Synthetic oligonucleotide
  misc_feature 1..20: note = Target: FXN; (+) strand; PAM type: YTN; PAM sequence: TTT
  source 1..20: mol_type = other DNA
taggtaattaatattttccc

SEQ ID NO: 35577 - DNA, 20 bp, synthetic construct
  misc_feature 1..20: note = Description of Artificial Sequence: Synthetic oligonucleotide
  misc_feature 1..20: note = Target: FXN; (+) strand; PAM type: YTN; PAM sequence: TTT
  source 1..20: mol_type = other DNA
aggtaattaatattttccca

SEQ ID NO: 35578 - DNA, 20 bp, synthetic construct
  misc_feature 1..20: note = Description of Artificial Sequence: Synthetic oligonucleotide
  misc_feature 1..20: note = Target: FXN; (+) strand; PAM type: YTN; PAM sequence: TTA
  source 1..20: mol_type = other DNA
ggtaattaatattttcccat

SEQ ID NO: 35579 - DNA, 20 bp, synthetic construct
  misc_feature 1..20: note = Description of Artificial Sequence: Synthetic oligonucleotide
  misc_feature 1..20: note = Target: FXN; (+) strand; PAM type: YTN; PAM sequence: TTA
  source 1..20: mol_type = other DNA
atattttcccatttattatt

SEQ ID NO: 35580 - DNA, 20 bp, synthetic construct
  misc_feature 1..20: note = Description of Artificial Sequence: Synthetic oligonucleotide
  misc_feature 1..20: note = Target: FXN; (+) strand; PAM type: YTN; PAM sequence: TTT
  source 1..20: mol_type = other DNA
tcccatttattattctgtga

SEQ ID NO: 35581 - DNA, 20 bp, synthetic construct
  misc_feature 1..20: note = Description of Artificial Sequence: Synthetic oligonucleotide
  misc_feature 1..20: note = Target: FXN; (+) strand; PAM type: YTN; PAM sequence: TTT
  source 1..20: mol_type = other DNA
cccatttattattctgtgat

SEQ ID NO: 35582 - DNA, 20 bp, synthetic construct
  misc_feature 1..20: note = Description of Artificial Sequence: Synthetic oligonucleotide
  misc_feature 1..20: note = Target: FXN; (+) strand; PAM type: YTN; PAM sequence: TTC
  source 1..20: mol_type = other DNA
ccatttattattctgtgatc

SEQ ID NO: 35583 - DNA, 20 bp, synthetic construct
  misc_feature 1..20: note = Description of Artificial Sequence: Synthetic oligonucleotide
  misc_feature 1..20: note = Target: FXN; (+) strand; PAM type: YTN; PAM sequence: TTT
  source 1..20: mol_type = other DNA
attattctgtgatctctaat

SEQ ID NO: 35584 - DNA, 20 bp, synthetic construct
  misc_feature 1..20: note = Description of Artificial Sequence: Synthetic oligonucleotide
  misc_feature 1..20: note = Target: FXN; (+) strand; PAM type: YTN; PAM sequence: TTA
  source 1..20: mol_type = other DNA
ttattctgtgatctctaatg

SEQ ID NO: 35585 - DNA, 20 bp, synthetic construct
  misc_feature 1..20: note = Description of Artificial Sequence: Synthetic oligonucleotide
  misc_feature 1..20: note = Target: FXN; (+) strand; PAM type: YTN; PAM sequence: TTA
  source 1..20: mol_type = other DNA
ttctgtgatctctaatgctt

SEQ ID NO: 35586 - DNA, 20 bp, synthetic construct
  misc_feature 1..20: note = Description of Artificial Sequence: Synthetic oligonucleotide
  misc_feature 1..20: note = Target: FXN; (+) strand; PAM type: YTN; PAM sequence: TTC
  source 1..20: mol_type = other DNA
tgtgatctctaatgctttgt

SEQ ID NO: 35587 - DNA, 20 bp, synthetic construct
  misc_feature 1..20: note = Description of Artificial Sequence: Synthetic oligonucleotide
  misc_feature 1..20: note = Target: FXN; (+) strand; PAM type: YTN; PAM sequence: CTG
  source 1..20: mol_type = other DNA
tgatctctaatgctttgttc

SEQ ID NO: 35588 - DNA, 20 bp, synthetic construct
  misc_feature 1..20: note = Description of Artificial Sequence: Synthetic oligonucleotide
  misc_feature 1..20: note = Target: FXN; (+) strand; PAM type: YTN; PAM sequence: CTC
  source 1..20: mol_type = other DNA
taatgctttgttcagaataa

SEQ ID NO: 35589 - DNA, 20 bp, synthetic construct
  misc_feature 1..20: note = Description of Artificial Sequence: Synthetic oligonucleotide
  misc_feature 1..20: note = Target: FXN; (+) strand; PAM type: YTN; PAM sequence: CTA
  source 1..20: mol_type = other DNA
atgctttgttcagaataaat

SEQ ID NO: 35590 - DNA, 20 bp, synthetic construct
  misc_feature 1..20: note = Description of Artificial Sequence: Synthetic oligonucleotide
  misc_feature 1..20: note = Target: FXN; (+) strand; PAM type: YTN; PAM sequence: CTT
  source 1..20: mol_type = other DNA
tgttcagaataaatagtgtg

SEQ ID NO: 35591 - DNA, 20 bp, synthetic construct
  misc_feature 1..20: note = Description of Artificial Sequence: Synthetic oligonucleotide
  misc_feature 1..20: note = Target: FXN; (+) strand; PAM type: YTN; PAM sequence: TTT
  source 1..20: mol_type = other DNA
gttcagaataaatagtgtgt

SEQ ID NO: 35592 - DNA, 20 bp, synthetic construct
  misc_feature 1..20: note = Description of Artificial Sequence: Synthetic oligonucleotide
  misc_feature 1..20: note = Target: FXN; (+) strand; PAM type: YTN; PAM sequence: TTG
  source 1..20: mol_type = other DNA
ttcagaataaatagtgtgtt

SEQ ID NO: 35593 - DNA, 20 bp, synthetic construct
  misc_feature 1..20: note = Description of Artificial Sequence: Synthetic oligonucleotide
  misc_feature 1..20: note = Target: FXN; (+) strand; PAM type: YTN; PAM sequence: TTC
  source 1..20: mol_type = other DNA
agaataaatagtgtgtttcc

SEQ ID NO: 35594 - DNA, 20 bp, synthetic construct
  misc_feature 1..20: note = Description of Artificial Sequence: Synthetic oligonucleotide
  misc_feature 1..20: note = Target: FXN; (+) strand; PAM type: YTN; PAM sequence: TTT
  source 1..20: mol_type = other DNA
cctttccccacactttcatc

SEQ ID NO: 35595 - DNA, 20 bp, synthetic construct
  misc_feature 1..20: note = Description of Artificial Sequence: Synthetic oligonucleotide
  misc_feature 1..20: note = Target: FXN; (+) strand; PAM type: YTN; PAM sequence: TTC
  source 1..20: mol_type = other DNA
ctttccccacactttcatcc

SEQ ID NO: 35596 - DNA, 20 bp, synthetic construct
  misc_feature 1..20: note = Description of Artificial Sequence: Synthetic oligonucleotide
  misc_feature 1..20: note = Target: FXN; (+) strand; PAM type: YTN; PAM sequence: CTT
  source 1..20: mol_type = other DNA
tccccacactttcatccaag

SEQ ID NO: 35597 - DNA, 20 bp, synthetic construct
  misc_feature 1..20: note = Description of Artificial Sequence: Synthetic oligonucleotide
  misc_feature 1..20: note = Target: FXN; (+) strand; PAM type: YTN; PAM sequence: TTT
  source 1..20: mol_type = other DNA
ccccacactttcatccaaga

SEQ ID NO: 35598 - DNA, 20 bp, synthetic construct
  misc_feature 1..20: note = Description of Artificial Sequence: Synthetic oligonucleotide
  misc_feature 1..20: note = Target: FXN; (+) strand; PAM type: YTN; PAM sequence: TTC
  source 1..20: mol_type = other DNA
cccacactttcatccaagaa

SEQ ID NO: 35599 - DNA, 20 bp, synthetic construct
  misc_feature 1..20: note = Description of Artificial Sequence: Synthetic oligonucleotide
  misc_feature 1..20: note = Target: FXN; (+) strand; PAM type: YTN; PAM sequence: CTT
  source 1..20: mol_type = other DNA
tcatccaagaagtgtgctag

SEQ ID NO: 35600 - DNA, 20 bp, synthetic construct
  misc_feature 1..20: note = Description of Artificial Sequence: Synthetic oligonucleotide
  misc_feature 1..20: note = Target: FXN; (+) strand; PAM type: YTN; PAM sequence: TTT
  source 1..20: mol_type = other DNA
catccaagaagtgtgctaga

SEQ ID NO: 35601 - DNA, 20 bp, synthetic construct
  misc_feature 1..20: note = Description of Artificial Sequence: Synthetic oligonucleotide
  misc_feature 1..20: note = Target: FXN; (+) strand; PAM type: YTN; PAM sequence: TTC
  source 1..20: mol_type = other DNA
atccaagaagtgtgctagag

SEQ ID NO: 35602 - DNA, 20 bp, synthetic construct
  misc_feature 1..20: note = Description of Artificial Sequence: Synthetic oligonucleotide
  misc_feature 1..20: note = Target: FXN; (+) strand; PAM type: YTN; PAM sequence: CTA
  source 1..20: mol_type = other DNA
gagttcaacaaaaacagcac

SEQ ID NO: 35603 - DNA, 20 bp, synthetic construct
  misc_feature 1..20: note = Description of Artificial Sequence: Synthetic oligonucleotide
  misc_feature 1..20: note = Target: FXN; (+) strand; PAM type: YTN; PAM sequence: TTC
  source 1..20: mol_type = other DNA
aacaaaaacagcactagaaa

SEQ ID NO: 35604 - DNA, 20 bp, synthetic construct
  misc_feature 1..20: note = Description of Artificial Sequence: Synthetic oligonucleotide
  misc_feature 1..20: note = Target: FXN; (+) strand; PAM type: YTN; PAM sequence: CTA
  source 1..20: mol_type = other DNA
gaaatcactgtcattctagg

SEQ ID NO: 35605 - DNA, 20 bp, synthetic construct
  misc_feature 1..20: note = Description of Artificial Sequence: Synthetic oligonucleotide
  misc_feature 1..20: note = Target: FXN; (+) strand; PAM type: YTN; PAM sequence: CTG
  source 1..20: mol_type = other DNA
tcattctaggaaggccctaa

SEQ ID NO: 35606 - DNA, 20 bp, synthetic construct
  misc_feature 1..20: note = Description of Artificial Sequence: Synthetic oligonucleotide
  misc_feature 1..20: note = Target: FXN; (+) strand; PAM type: YTN; PAM sequence: TTC
  source 1..20: mol_type = other DNA
taggaaggccctaattcaca

SEQ ID NO: 35607 - DNA, 20 bp, synthetic construct
  misc_feature 1..20: note = Description of Artificial Sequence: Synthetic oligonucleotide
  misc_feature 1..20: note = Target: FXN; (+) strand; PAM type: YTN; PAM sequence: CTA
  source 1..20: mol_type = other DNA
ggaaggccctaattcacaga

SEQ ID NO: 35608 - DNA, 20 bp, synthetic construct
  misc_feature 1..20: note = Description of Artificial Sequence: Synthetic oligonucleotide
  misc_feature 1..20: note = Target: FXN; (+) strand; PAM type: YTN; PAM sequence: CTA
  source 1..20: mol_type = other DNA
attcacagattgtattggtt

SEQ ID NO: 35609 - DNA, 20 bp, synthetic construct
  misc_feature 1..20: note = Description of Artificial Sequence: Synthetic oligonucleotide
  misc_feature 1..20: note = Target: FXN; (+) strand; PAM type: YTN; PAM sequence: TTC
  source 1..20: mol_type = other DNA
acagattgtattggttttta

SEQ ID NO: 35610 - DNA, 20 bp, synthetic construct
  misc_feature 1..20: note = Description of Artificial Sequence: Synthetic oligonucleotide
  misc_feature 1..20: note = Target: FXN; (+) strand; PAM type: YTN; PAM sequence: TTG
  source 1..20: mol_type = other DNA
tattggtttttagacccagt

SEQ ID NO: 35611 - DNA, 20 bp, synthetic construct
  misc_feature 1..20: note = Description of Artificial Sequence: Synthetic oligonucleotide
  misc_feature 1..20: note = Target: FXN; (+) strand; PAM type: YTN; PAM sequence: TTG
  source 1..20: mol_type = other DNA
gtttttagacccagttagtg

SEQ ID NO: 35612 - DNA, 20 bp, synthetic construct
  misc_feature 1..20: note = Description of Artificial Sequence: Synthetic oligonucleotide
  misc_feature 1..20: note = Target: FXN; (+) strand; PAM type: YTN; PAM sequence: TTT
  source 1..20: mol_type = other DNA
ttagacccagttagtgtgct

SEQ ID NO: 35613 - DNA, 20 bp, synthetic construct
  misc_feature 1..20: note = Description of Artificial Sequence: Synthetic oligonucleotide
  misc_feature 1..20: note = Target: FXN; (+) strand; PAM type: YTN; PAM sequence: TTT
  source 1..20: mol_type = other DNA
tagacccagttagtgtgctg

SEQ ID NO: 35614 - DNA, 20 bp, synthetic construct
  misc_feature 1..20: note = Description of Artificial Sequence: Synthetic oligonucleotide
  misc_feature 1..20: note = Target: FXN; (+) strand; PAM type: YTN; PAM sequence: TTT
  source 1..20: mol_type = other DNA
agacccagttagtgtgctgg

SEQ ID NO: 35615 - DNA, 20 bp, synthetic construct
  misc_feature 1..20: note = Description of Artificial Sequence: Synthetic oligonucleotide
  misc_feature 1..20: note = Target: FXN; (+) strand; PAM type: YTN; PAM sequence: TTA
  source 1..20: mol_type = other DNA
gacccagttagtgtgctgga

SEQ ID NO: 35616 - DNA, 20 bp, synthetic construct
  misc_feature 1..20: note = Description of Artificial Sequence: Synthetic oligonucleotide
  misc_feature 1..20: note = Target: FXN; (+) strand; PAM type: YTN; PAM sequence: TTA
  source 1..20: mol_type = other DNA
gtgtgctggaggttggagga

SEQ ID NO: 35617 - DNA, 20 bp, synthetic construct
  misc_feature 1..20: note = Description of Artificial Sequence: Synthetic oligonucleotide
  misc_feature 1..20: note = Target: FXN; (+) strand; PAM type: YTN; PAM sequence: CTG
  source 1..20: mol_type = other DNA
gaggttggaggattttaacc

SEQ ID NO: 35618 - DNA, 20 bp, synthetic construct
  misc_feature 1..20: note = Description of Artificial Sequence: Synthetic oligonucleotide
  misc_feature 1..20: note = Target: FXN; (+) strand; PAM type: YTN; PAM sequence: TTG
  source 1..20: mol_type = other DNA
gaggattttaacctctgtgg

SEQ ID NO: 35619 - DNA, 20 bp, synthetic construct
  misc_feature 1..20: note = Description of Artificial Sequence: Synthetic oligonucleotide
  misc_feature 1..20: note = Target: FXN; (+) strand; PAM type: YTN; PAM sequence: TTT
  source 1..20: mol_type = other DNA
taacctctgtgggccaacta

SEQ ID NO: 35620 - DNA, 20 bp, synthetic construct
  misc_feature 1..20: note = Description of Artificial Sequence: Synthetic oligonucleotide
  misc_feature 1..20: note = Target: FXN; (+) strand; PAM type: YTN; PAM sequence: TTT
  source 1..20: mol_type = other DNA
aacctctgtgggccaactag

SEQ ID NO: 35621 - DNA, 20 bp, synthetic construct
  misc_feature 1..20: note = Description of Artificial Sequence: Synthetic oligonucleotide
  misc_feature 1..20: note = Target: FXN; (+) strand; PAM type: YTN; PAM sequence: TTA
  source 1..20: mol_type = other DNA
acctctgtgggccaactagc

SEQ ID NO: 35622 - DNA, 20 bp, synthetic construct
  misc_feature 1..20: note = Description of Artificial Sequence: Synthetic oligonucleotide
  misc_feature 1..20: note = Target: FXN; (+) strand; PAM type: YTN; PAM sequence: CTC
  source 1..20: mol_type = other DNA
tgtgggccaactagcctctg

SEQ ID NO: 35623 - DNA, 20 bp, synthetic construct
  misc_feature 1..20: note = Description of Artificial Sequence: Synthetic oligonucleotide
  misc_feature 1..20: note = Target: FXN; (+) strand; PAM type: YTN; PAM sequence: CTG
  source 1..20: mol_type = other DNA
tgggccaactagcctctgtg

SEQ ID NO: 35624 - DNA, 20 bp, synthetic construct
  misc_feature 1..20: note = Description of Artificial Sequence: Synthetic oligonucleotide
  misc_feature 1..20: note = Target: FXN; (+) strand; PAM type: YTN; PAM sequence: CTA
  source 1..20: mol_type = other DNA
gcctctgtggcctcagtcat

SEQ ID NO: 35625 - DNA, 20 bp, synthetic construct
  misc_feature 1..20: note = Description of Artificial Sequence: Synthetic oligonucleotide
  misc_feature 1..20: note = Target: FXN; (+) strand; PAM type: YTN; PAM sequence: CTC
  source 1..20: mol_type = other DNA
tgtggcctcagtcattcttc

SEQ ID NO: 35626 - DNA, 20 bp, synthetic construct
  misc_feature 1..20: note = Description of Artificial Sequence: Synthetic oligonucleotide
  misc_feature 1..20: note = Target: FXN; (+) strand; PAM type: YTN; PAM sequence: CTG
  source 1..20: mol_type = other DNA
tggcctcagtcattcttcct

SEQ ID NO: 35627 - DNA, 20 bp, synthetic construct
  misc_feature 1..20: note = Description of Artificial Sequence: Synthetic oligonucleotide
  misc_feature 1..20: note = Target: FXN; (+) strand; PAM type: YTN; PAM sequence: CTC
  source 1..20: mol_type = other DNA
agtcattcttcctgaccctg

SEQ ID NO: 35628 - DNA, 20 bp, synthetic construct
  misc_feature 1..20: note = Description of Artificial Sequence: Synthetic oligonucleotide
  misc_feature 1..20: note = Target: FXN; (+) strand; PAM type: YTN; PAM sequence: TTC
  source 1..20: mol_type = other DNA
ttcctgaccctggctgtgct

SEQ ID NO: 35629 - DNA, 20 bp, synthetic construct
  misc_feature 1..20: note = Description of Artificial Sequence: Synthetic oligonucleotide
  misc_feature 1..20: note = Target: FXN; (+) strand; PAM type: YTN; PAM sequence: CTT
  source 1..20: mol_type = other DNA
cctgaccctggctgtgcttg

SEQ ID NO: 35630 - DNA, 20 bp, synthetic construct
  misc_feature 1..20: note = Description of Artificial Sequence: Synthetic oligonucleotide
  misc_feature 1..20: note = Target: FXN; (+) strand; PAM type: YTN; PAM sequence: TTC
  source 1..20: mol_type = other DNA
ctgaccctggctgtgcttga

SEQ ID NO: 35631 - DNA, 20 bp, synthetic construct
  misc_feature 1..20: note = Description of Artificial Sequence: Synthetic oligonucleotide
  misc_feature 1..20: note = Target: FXN; (+) strand; PAM type: YTN; PAM sequence: CTG
  source 1..20: mol_type = other DNA
accctggctgtgcttgagcc

SEQ ID NO: 35632 - DNA, 20 bp, synthetic construct
  misc_feature 1..20: note = Description of Artificial Sequence: Synthetic oligonucleotide
  misc_feature 1..20: note = Target: FXN; (+) strand; PAM type: YTN; PAM sequence: CTG
  source 1..20: mol_type = other DNA
gctgtgcttgagcctgtgtg

SEQ ID NO: 35633 - DNA, 20 bp, synthetic construct
  misc_feature 1..20: note = Description of Artificial Sequence: Synthetic oligonucleotide
  misc_feature 1..20: note = Target: FXN; (+) strand; PAM type: YTN; PAM sequence: CTG
  source 1..20: mol_type = other DNA
tgcttgagcctgtgtgttct

SEQ ID NO: 35634 - DNA, 20 bp, synthetic construct
  misc_feature 1..20: note = Description of Artificial Sequence: Synthetic oligonucleotide
  misc_feature 1..20: note = Target: FXN; (+) strand; PAM type: YTN; PAM sequence: CTT
  source 1..20: mol_type = other DNA
gagcctgtgtgttcttatcc

SEQ ID NO: 35635 - DNA, 20 bp, synthetic construct
  misc_feature 1..20: note = Description of Artificial Sequence: Synthetic oligonucleotide
  misc_feature 1..20: note = Target: FXN; (+) strand; PAM type: YTN; PAM sequence: TTG
  source 1..20: mol_type = other DNA
agcctgtgtgttcttatcct

SEQ ID NO: 35636 - DNA, 20 bp, synthetic construct
  misc_feature 1..20: note = Description of Artificial Sequence: Synthetic oligonucleotide
  misc_feature 1..20: note = Target: FXN; (+) strand; PAM type: YTN; PAM sequence: CTG
  source 1..20: mol_type = other DNA
tgtgttcttatccttcatct

SEQ ID NO: 35637 - DNA, 20 bp, synthetic construct
  misc_feature 1..20: note = Description of Artificial Sequence: Synthetic oligonucleotide
  misc_feature 1..20: note = Target: FXN; (+) strand; PAM type: YTN; PAM sequence: TTC
  source 1..20: mol_type = other DNA
ttatccttcatctccggggg

SEQ ID NO: 35638 - DNA, 20 bp, synthetic construct
  misc_feature 1..20: note = Description of Artificial Sequence: Synthetic oligonucleotide
  misc_feature 1..20: note = Target: FXN; (+) strand; PAM type: YTN; PAM sequence: CTT
  source 1..20: mol_type = other DNA
atccttcatctccgggggaa

SEQ ID NO: 35639 - DNA, 20 bp, synthetic construct
  misc_feature 1..20: note = Description of Artificial Sequence: Synthetic oligonucleotide
  misc_feature 1..20: note = Target: FXN; (+) strand; PAM type: YTN; PAM sequence: TTA
  source 1..20: mol_type = other DNA
tccttcatctccgggggaac

SEQ ID NO: 35640 - DNA, 20 bp, synthetic construct
  misc_feature 1..20: note = Description of Artificial Sequence: Synthetic oligonucleotide
  misc_feature 1..20: note = Target: FXN; (+) strand; PAM type: YTN; PAM sequence: CTT
  source 1..20: mol_type = other DNA
catctccgggggaacgaagt

SEQ ID NO: 35641 - DNA, 20 bp, synthetic construct
  misc_feature 1..20: note = Description of Artificial Sequence: Synthetic oligonucleotide
  misc_feature 1..20: note = Target: FXN; (+) strand; PAM type: YTN; PAM sequence: TTC
  source 1..20: mol_type = other DNA
atctccgggggaacgaagtg

SEQ ID NO: 35642 - DNA, 20 bp, synthetic construct
  misc_feature 1..20: note = Description of Artificial Sequence: Synthetic oligonucleotide
  misc_feature 1..20: note = Target: FXN; (+) strand; PAM type: YTN; PAM sequence: CTC
  source 1..20: mol_type = other DNA
cgggggaacgaagtggatca

SEQ ID NO: 35643 - DNA, 20 bp, synthetic construct
  misc_feature 1..20: note = Description of Artificial Sequence: Synthetic oligonucleotide
  misc_feature 1..20: note = Target: FXN; (+) strand; PAM type: YTN; PAM sequence: CTC
  source 1..20: mol_type = other DNA
ggtccagcgatcacttttgg

SEQ ID NO: 35644 - DNA, 20 bp, synthetic construct
  misc_feature 1..20: note = Description of Artificial Sequence: Synthetic oligonucleotide
  misc_feature 1..20: note = Target: FXN; (+) strand; PAM type: YTN; PAM sequence: CTT
  source 1..20: mol_type = other DNA
ttggggatcagtggctttgt

SEQ ID NO: 35645 - DNA, 20 bp, synthetic construct
  misc_feature 1..20: note = Description of Artificial Sequence: Synthetic oligonucleotide
  misc_feature 1..20: note = Target: FXN; (+) strand; PAM type: YTN; PAM sequence: TTT
  source 1..20: mol_type = other DNA
tggggatcagtggctttgta

SEQ ID NO: 35646 - DNA, 20 bp, synthetic construct
  misc_feature 1..20: note = Description of Artificial Sequence: Synthetic oligonucleotide
  misc_feature 1..20: note = Target: FXN; (+) strand; PAM type: YTN; PAM sequence: TTT
  source 1..20: mol_type = other DNA
ggggatcagtggctttgtag

SEQ ID NO: 35647 - DNA, 20 bp, synthetic construct
  misc_feature 1..20: note = Description of Artificial Sequence: Synthetic oligonucleotide
  misc_feature 1..20: note = Target: FXN; (+) strand; PAM type: YTN; PAM sequence: TTG
  source 1..20: mol_type = other DNA
gggatcagtggctttgtaga

SEQ ID NO: 35648 - DNA, 20 bp, synthetic construct
  misc_feature 1..20: note = Description of Artificial Sequence: Synthetic oligonucleotide
  misc_feature 1..20: note = Target: FXN; (+) strand; PAM type: YTN; PAM sequence: CTT
  source 1..20: mol_type = other DNA
tgtagatatcgggcaggcac

SEQ ID NO: 35649 - DNA, 20 bp, synthetic construct
  misc_feature 1..20: note = Description of Artificial Sequence: Synthetic oligonucleotide
  misc_feature 1..20: note = Target: FXN; (+) strand; PAM type: YTN; PAM sequence: TTT
  source 1..20: mol_type = other DNA
gtagatatcgggcaggcact

SEQ ID NO: 35650 - DNA, 20 bp, synthetic construct
  misc_feature 1..20: note = Description of Artificial Sequence: Synthetic oligonucleotide
  misc_feature 1..20: note = Target: FXN; (+) strand; PAM type: YTN; PAM sequence: TTG
  source 1..20: mol_type = other DNA
tagatatcgggcaggcactt

SEQ ID NO: 35651 - DNA, 20 bp, synthetic construct
  misc_feature 1..20: note = Description of Artificial Sequence: Synthetic oligonucleotide
  misc_feature 1..20: note = Target: FXN; (+) strand; PAM type: YTN; PAM sequence: CTT
  source 1..20: mol_type = other DNA
accccaaaagaactttcccc

SEQ ID NO: 35652 - DNA, 20 bp, synthetic construct
  misc_feature 1..20: note = Description of Artificial Sequence: Synthetic oligonucleotide
  misc_feature 1..20: note = Target: FXN; (+) strand; PAM type: YTN; PAM sequence: TTA
  source 1..20: mol_type = other DNA
ccccaaaagaactttcccca

SEQ ID NO: 35653 - DNA, 20 bp, synthetic construct
  misc_feature 1..20: note = Description of Artificial Sequence: Synthetic oligonucleotide
  misc_feature 1..20: note = Target: FXN; (+) strand; PAM type: YTN; PAM sequence: CTT
  source 1..20: mol_type = other DNA
tccccatatctgaagactga

SEQ ID NO: 35654 - DNA, 20 bp, synthetic construct
  misc_feature 1..20: note = Description of Artificial Sequence: Synthetic oligonucleotide
  misc_feature 1..20: note = Target: FXN; (+) strand; PAM type: YTN; PAM sequence: TTT
  source 1..20: mol_type = other DNA
ccccatatctgaagactgaa

SEQ ID NO: 35655 - DNA, 20 bp, synthetic construct
  misc_feature 1..20: note = Description of Artificial Sequence: Synthetic oligonucleotide
  misc_feature 1..20: note = Target: FXN; (+) strand; PAM type: YTN; PAM sequence: TTC
  source 1..20: mol_type = other DNA
cccatatctgaagactgaaa

SEQ ID NO: 35656 - DNA, 20 bp, synthetic construct
  misc_feature 1..20: note = Description of Artificial Sequence: Synthetic oligonucleotide
  misc_feature 1..20: note = Target: FXN; (+) strand; PAM type: YTN; PAM sequence: CTG
  source 1..20: mol_type = other DNA
aagactgaaaacgtccatat

SEQ ID NO: 35657 - DNA, 20 bp, synthetic construct
  misc_feature 1..20: note = Description of Artificial Sequence: Synthetic oligonucleotide
  misc_feature 1..20: note = Target: FXN; (+) strand; PAM type: YTN; PAM sequence: CTG
  source 1..20: mol_type = other DNA
aaaacgtccatatcgtattt

SEQ ID NO: 35658 - DNA, 20 bp, synthetic construct
  misc_feature 1..20: note = Description of Artificial Sequence: Synthetic oligonucleotide
  misc_feature 1..20: note = Target: FXN; (+) strand; PAM type: YTN; PAM sequence: TTT
  source 1..20: mol_type = other DNA
ggacacactgcccagcaata

SEQ ID NO: 35659 - DNA, 20 bp, synthetic construct
  misc_feature 1..20: note = Description of Artificial Sequence: Synthetic oligonucleotide
  misc_feature 1..20: note = Target: FXN; (+) strand; PAM type: YTN; PAM sequence: TTG
  source 1..20: mol_type = other DNA
gacacactgcccagcaatac

SEQ ID NO: 35660 - DNA, 20 bp, synthetic construct
  misc_feature 1..20: note = Description of Artificial Sequence: Synthetic oligonucleotide
  misc_feature 1..20: note = Target: FXN; (+) strand; PAM type: YTN; PAM sequence: CTG
  source 1..20: mol_type = other DNA
cccagcaatacgctctagct

SEQ ID NO: 35661 - DNA, 20 bp, synthetic construct
  misc_feature 1..20: note = Description of Artificial Sequence: Synthetic oligonucleotide
  misc_feature 1..20: note = Target: FXN; (+) strand; PAM type: YTN; PAM sequence: CTC
  source 1..20: mol_type = other DNA
tagctgtgttcagaagcatg

SEQ ID NO: 35662 - DNA, 20 bp, synthetic construct
  misc_feature 1..20: note = Description of Artificial Sequence: Synthetic oligonucleotide
  misc_feature 1..20: note = Target: FXN; (+) strand; PAM type: YTN; PAM sequence: CTA
  source 1..20: mol_type = other DNA
gctgtgttcagaagcatggg

SEQ ID NO: 35663 - DNA, 20 bp, synthetic construct
  misc_feature 1..20: note = Description of Artificial Sequence: Synthetic oligonucleotide
  misc_feature 1..20: note = Target: FXN; (+) strand; PAM type: YTN; PAM sequence: CTG
  source 1..20: mol_type = other DNA
tgttcagaagcatgggaatt

SEQ ID NO: 35664 - DNA, 20 bp, synthetic construct
  misc_feature 1..20: note = Description of Artificial Sequence: Synthetic oligonucleotide
  misc_feature 1..20: note = Target: FXN; (+) strand; PAM type: YTN; PAM sequence: TTC
  source 1..20: mol_type = other DNA
agaagcatgggaatttggaa

SEQ ID NO: 35665 - DNA, 20 bp, synthetic construct
  misc_feature 1..20: note = Description of Artificial Sequence: Synthetic oligonucleotide
  misc_feature 1..20: note = Target: FXN; (+) strand; PAM type: YTN; PAM sequence: TTT
  source 1..20: mol_type = other DNA
ggaaagatctgctgagcatg

SEQ ID NO: 35666 - DNA, 20 bp, synthetic construct
  misc_feature 1..20: note = Description of Artificial Sequence: Synthetic oligonucleotide
  misc_feature 1..20: note = Target: FXN; (+) strand; PAM type: YTN; PAM sequence: TTG
  source 1..20: mol_type = other DNA
gaaagatctgctgagcatgc

SEQ ID NO: 35667 - DNA, 20 bp, synthetic construct
  misc_feature 1..20: note = Description of Artificial Sequence: Synthetic oligonucleotide
  misc_feature 1..20: note = Target: FXN; (+) strand; PAM type: YTN; PAM sequence: CTG
  source 1..20: mol_type = other DNA
ctgagcatgccgtttactgt

SEQ ID NO: 35668 - DNA, 20 bp, synthetic construct
  misc_feature 1..20: note = Description of Artificial Sequence: Synthetic oligonucleotide
  misc_feature 1..20: note = Target: FXN; (+) strand; PAM type: YTN; PAM sequence: CTG
  source 1..20: mol_type = other DNA
agcatgccgtttactgtcac

SEQ ID NO: 35669 - DNA, 20 bp, synthetic construct
  misc_feature 1..20: note = Description of Artificial Sequence: Synthetic oligonucleotide
  misc_feature 1..20: note = Target: FXN; (+) strand; PAM type: YTN; PAM sequence: TTT
  source 1..20: mol_type = other DNA
actgtcacagatactatctt

SEQ ID NO: 35670 - DNA, 20 bp, synthetic construct
  misc_feature 1..20: note = Description of Artificial Sequence: Synthetic oligonucleotide
  misc_feature 1..20: note = Target: FXN; (+) strand; PAM type: YTN; PAM sequence: TTA
  source 1..20: mol_type = other DNA
ctgtcacagatactatcttc

SEQ ID NO: 35671 - DNA, 20 bp, synthetic construct
  misc_feature 1..20: note = Description of Artificial Sequence: Synthetic oligonucleotide
  misc_feature 1..20: note = Target: FXN; (+) strand; PAM type: YTN; PAM sequence: CTG
  source 1..20: mol_type = other DNA
tcacagatactatcttcctc

SEQ ID NO: 35672 - DNA, 20 bp, synthetic construct
  misc_feature 1..20: note = Description of Artificial Sequence: Synthetic oligonucleotide
  misc_feature 1..20: note = Target: FXN; (+) strand; PAM type: YTN; PAM sequence: CTA
  source 1..20: mol_type = other DNA
tcttcctcaaaaaaaaaaaa

SEQ ID NO: 35673 - DNA, 20 bp, synthetic construct
  misc_feature 1..20: note = Description of Artificial Sequence: Synthetic oligonucleotide
  misc_feature 1..20: note = Target: FXN; (+) strand; PAM type: YTN; PAM sequence: CTT
  source 1..20: mol_type = other DNA
cctcaaaaaaaaaaaatata

SEQ ID NO: 35674 - DNA, 20 bp, synthetic construct
  misc_feature 1..20: note = Description of Artificial Sequence: Synthetic oligonucleotide
  misc_feature 1..20: note = Target: FXN; (+) strand; PAM type: YTN; PAM sequence: TTC
  source 1..20: mol_type = other DNA
ctcaaaaaaaaaaaatatat

SEQ ID NO: 35675 - DNA, 20 bp, synthetic construct
  misc_feature 1..20: note = Description of Artificial Sequence: Synthetic oligonucleotide
  misc_feature 1..20: note = Target: FXN; (+) strand; PAM type: YTN; PAM sequence: CTC
  source 1..20: mol_type = other DNA
aaaaaaaaaaaatatatata

SEQ ID NO: 35676 - DNA, 20 bp, synthetic construct
  misc_feature 1..20: note = Description of Artificial Sequence: Synthetic oligonucleotide
  misc_feature 1..20: note = Target: FXN; (+) strand; PAM type: YTN; PAM sequence: TTG
  source 1..20: mol_type = other DNA
agactgggtgagactgaaga

SEQ ID NO: 35677 - DNA, 20 bp, synthetic construct
  misc_feature 1..20: note = Description of Artificial Sequence: Synthetic oligonucleotide
  misc_feature 1..20: note = Target: FXN; (+) strand; PAM type: YTN; PAM sequence: CTG
  source 1..20: mol_type = other DNA
ggtgagactgaagaggtgcc

SEQ ID NO: 35678 - DNA, 20 bp, synthetic construct
  misc_feature 1..20: note = Description of Artificial Sequence: Synthetic oligonucleotide
  misc_feature 1..20: note = Target: FXN; (+) strand; PAM type: YTN; PAM sequence: CTG
  source 1..20: mol_type = other DNA
aagaggtgccttggccagag

SEQ ID NO: 35679 - DNA, 20 bp, synthetic construct
  misc_feature 1..20: note = Description of Artificial Sequence: Synthetic oligonucleotide
  misc_feature 1..20: note = Target: FXN; (+) strand; PAM type: YTN; PAM sequence: CTT
  source 1..20: mol_type = other DNA
ggccagagcaggccacaccc

SEQ ID NO: 35680 - DNA, 20 bp, synthetic construct
  misc_feature 1..20: note = Description of Artificial Sequence: Synthetic oligonucleotide
  misc_feature 1..20: note = Target: FXN; (+) strand; PAM type: YTN; PAM sequence: TTG
  source 1..20: mol_type = other DNA
gccagagcaggccacaccca

SEQ ID NO: 35681 - DNA, 20 bp, synthetic construct
  misc_feature 1..20: note = Description of Artificial Sequence: Synthetic oligonucleotide
  misc_feature 1..20: note = Target: FXN; (+) strand; PAM type: YTN; PAM sequence: CTC
  source 1..20: mol_type = other DNA
cccggtccacctcaggcccc

SEQ ID NO: 35682 - DNA, 20 bp, synthetic construct
  misc_feature 1..20: note = Description of Artificial Sequence: Synthetic oligonucleotide
  misc_feature 1..20: note = Target: FXN; (+) strand; PAM type: YTN; PAM sequence: CTC
  source 1..20: mol_type = other DNA
aggcccctccccttcctgcg

SEQ ID NO: 35683 - DNA, 20 bp, synthetic construct
  misc_feature 1..20: note = Description of Artificial Sequence: Synthetic oligonucleotide
  misc_feature 1..20: note = Target: FXN; (+) strand; PAM type: YTN; PAM sequence: CTC
  source 1..20: mol_type = other DNA
cccttcctgcgccgtttccg

SEQ ID NO: 35684 - DNA, 20 bp, synthetic construct
  misc_feature 1..20: note = Description of Artificial Sequence: Synthetic oligonucleotide
  misc_feature 1..20: note = Target: FXN; (+) strand; PAM type: YTN; PAM sequence: CTT
  source 1..20: mol_type = other DNA
cctgcgccgtttccggcaga

SEQ ID NO: 35685 - DNA, 20 bp, synthetic construct
  misc_feature 1..20: note = Description of Artificial Sequence: Synthetic oligonucleotide
  misc_feature 1..20: note = Target: FXN; (+) strand; PAM type: YTN; PAM sequence: TTC
  source 1..20: mol_type = other DNA
ctgcgccgtttccggcagat

SEQ ID NO: 35686 - DNA, 20 bp, synthetic construct
  misc_feature 1..20: note = Description of Artificial Sequence: Synthetic oligonucleotide
  misc_feature 1..20: note = Target: FXN; (+) strand; PAM type: YTN; PAM sequence: CTG
  source 1..20: mol_type = other DNA
cgccgtttccggcagatcca

SEQ ID NO: 35687 - DNA, 20 bp, synthetic construct
  misc_feature 1..20: note = Description of Artificial Sequence: Synthetic oligonucleotide
  misc_feature 1..20: note = Target: FXN; (+) strand; PAM type: YTN; PAM sequence: TTT
  source 1..20: mol_type = other DNA
ccggcagatccagagtggcc

SEQ ID NO: 35688 - DNA, 20 bp, synthetic construct
  misc_feature 1..20: note = Description of Artificial Sequence: Synthetic oligonucleotide
  misc_feature 1..20: note = Target: FXN; (+) strand; PAM type: YTN; PAM sequence: TTC
  source 1..20: mol_type = other DNA
cggcagatccagagtggcca

SEQ ID NO: 35689 - DNA, 20 bp, synthetic construct
  misc_feature 1..20: note = Description of Artificial Sequence: Synthetic oligonucleotide
  misc_feature 1..20: note = Target: FXN; (+) strand; PAM type: YTN; PAM sequence: CTG
  source 1..20: mol_type = other DNA
aggacaagctctcagtgctt

SEQ ID NO: 35690 - DNA, 20 bp, synthetic construct
  misc_feature 1..20: note = Description of Artificial Sequence: Synthetic oligonucleotide
  misc_feature 1..20: note = Target: FXN; (+) strand; PAM type: YTN; PAM sequence: CTC
  source 1..20: mol_type = other DNA
tcagtgcttctgtgggaagt

SEQ ID NO: 35691 - DNA, 20 bp, synthetic construct
  misc_feature 1..20: note = Description of Artificial Sequence: Synthetic oligonucleotide
  misc_feature 1..20: note = Target: FXN; (+) strand; PAM type: YTN; PAM sequence: CTC
  source 1..20: mol_type = other DNA
agtgcttctgtgggaagtgg

SEQ ID NO: 35692 - DNA, 20 bp, synthetic construct
  misc_feature 1..20: note = Description of Artificial Sequence: Synthetic oligonucleotide
  misc_feature 1..20: note = Target: FXN; (+) strand; PAM type: YTN; PAM sequence: CTT
  source 1..20: mol_type = other DNA
ctgtgggaagtggcggcaag

SEQ ID NO: 35693 - DNA, 20 bp, synthetic construct
  misc_feature 1..20: note = Description of Artificial Sequence: Synthetic oligonucleotide
  misc_feature 1..20: note = Target: FXN; (+) strand; PAM type: YTN; PAM sequence: TTC
  source 1..20: mol_type = other DNA
tgtgggaagtggcggcaaga

SEQ ID NO: 35694 - DNA, 20 bp, synthetic construct
  misc_feature 1..20: note = Description of Artificial Sequence: Synthetic oligonucleotide
  misc_feature 1..20: note = Target: FXN; (+) strand; PAM type: YTN; PAM sequence: CTG
  source 1..20: mol_type = other DNA
tgggaagtggcggcaagacg

SEQ ID NO: 35695 - DNA, 20 bp, synthetic construct
  misc_feature 1..20: note = Description of Artificial Sequence: Synthetic oligonucleotide
  misc_feature 1..20: note = Target: FXN; (+) strand; PAM type: YTN; PAM sequence: CTC
  source 1..20: mol_type = other DNA
ccagcgggggatggaggccg

SEQ ID NO: 35696 - DNA, 20 bp, synthetic construct
  misc_feature 1..20: note = Description of Artificial Sequence: Synthetic oligonucleotide
  misc_feature 1..20: note = Target: FXN; (+) strand; PAM type: YTN; PAM sequence: CTG
  source 1..20: mol_type = other DNA
ctggtcactggaggccagga

SEQ ID NO: 35697 - DNA, 20 bp, synthetic construct
  misc_feature 1..20: note = Description of Artificial Sequence: Synthetic oligonucleotide
  misc_feature 1..20: note = Target: FXN; (+) strand; PAM type: YTN; PAM sequence: CTG
  source 1..20: mol_type = other DNA
gtcactggaggccaggatgc

SEQ ID NO: 35698 - DNA, 20 bp, synthetic construct
  misc_feature 1..20: note = Description of Artificial Sequence: Synthetic oligonucleotide
  misc_feature 1..20: note = Target: FXN; (+) strand; PAM type: YTN; PAM sequence: CTG
  source 1..20: mol_type = other DNA
gaggccaggatgctgcctaa

SEQ ID NO: 35699 - DNA, 20 bp, synthetic construct
  misc_feature 1..20: note = Description of Artificial Sequence: Synthetic oligonucleotide
  misc_feature 1..20: note = Target: FXN; (+) strand; PAM type: YTN; PAM sequence: CTG
  source 1..20: mol_type = other DNA
cctaacacagccgtcccgct

SEQ ID NO: 35700 - DNA, 20 bp, synthetic construct
  misc_feature 1..20: note = Description of Artificial Sequence: Synthetic oligonucleotide
  misc_feature 1..20: note = Target: FXN; (+) strand; PAM type: YTN; PAM sequence: CTA
  source 1..20: mol_type = other DNA
acacagccgtcccgctccgg

SEQ ID NO: 35701 - DNA, 20 bp, synthetic construct
  misc_feature 1..20: note = Description of Artificial Sequence: Synthetic oligonucleotide
  misc_feature 1..20: note = Target: FXN; (+) strand; PAM type: YTN; PAM sequence: CTC
  source 1..20: mol_type = other DNA
cgggcctcaccaccagggcg

SEQ ID NO: 35702 - DNA, 20 bp, synthetic construct
  misc_feature 1..20: note = Description of Artificial Sequence: Synthetic oligonucleotide
  misc_feature 1..20: note = Target: FXN; (+) strand; PAM type: YTN; PAM sequence: CTC
  source 1..20: mol_type = other DNA
accaccagggcggctctccc

SEQ ID NO: 35703 - DNA, 20 bp, synthetic construct
  misc_feature 1..20: note = Description of Artificial Sequence: Synthetic oligonucleotide
  misc_feature 1..20: note = Target: FXN; (+) strand; PAM type: YTN; PAM sequence: CTC
  source 1..20: mol_type = other DNA
tccccactcccggcctgctg

SEQ ID NO: 35704 - DNA, 20 bp, synthetic construct
  misc_feature 1..20: note = Description of Artificial Sequence: Synthetic oligonucleotide
  misc_feature 1..20: note = Target: FXN; (+) strand; PAM type: YTN; PAM sequence: CTC
  source 1..20: mol_type = other DNA
cccactcccggcctgctgcc

SEQ ID NO: 35705 - DNA, 20 bp, synthetic construct
  misc_feature 1..20: note = Description of Artificial Sequence: Synthetic oligonucleotide
  misc_feature 1..20: note = Target: FXN; (+) strand; PAM type: YTN; PAM sequence: CTC
  source 1..20: mol_type = other DNA
ccggcctgctgcccacacag

SEQ ID NO: 35706 - DNA, 20 bp, synthetic construct
  misc_feature 1..20: note = Description of Artificial Sequence: Synthetic oligonucleotide
  misc_feature 1..20: note = Target: FXN; (+) strand; PAM type: YTN; PAM sequence: CTG
  source 1..20: mol_type = other DNA
ctgcccacacagactgcggg

SEQ ID NO: 35707 - DNA, 20 bp, synthetic construct
  misc_feature 1..20: note = Description of Artificial Sequence: Synthetic oligonucleotide
  misc_feature 1..20: note = Target: FXN; (+) strand; PAM type: YTN; PAM sequence: CTG
  source 1..20: mol_type = other DNA
cccacacagactgcggggtt

SEQ ID NO: 35708 - DNA, 20 bp, synthetic construct
  misc_feature 1..20: note = Description of Artificial Sequence: Synthetic oligonucleotide
  misc_feature 1..20: note = Target: FXN; (+) strand; PAM type: YTN; PAM sequence: CTG
  source 1..20: mol_type = other DNA
cggggttccgggggagcagg

SEQ ID NO: 35709 - DNA, 20 bp, synthetic construct
  misc_feature 1..20: note = Description of Artificial Sequence: Synthetic oligonucleotide
  misc_feature 1..20: note = Target: FXN; (+) strand; PAM type: YTN; PAM sequence: TTC
  source 1..20: mol_type = other DNA
cgggggagcaggacccaggc

SEQ ID NO: 35710 - DNA, 20 bp, synthetic construct
  misc_feature 1..20: note = Description of Artificial Sequence: Synthetic oligonucleotide
  misc_feature 1..20: note = Target: FXN; (+) strand; PAM type: YTN; PAM sequence: TTC
  source 1..20: mol_type = other DNA
tgcgcctgtcttcttggaag

SEQ ID NO: 35711 - DNA, 20 bp, synthetic construct
  misc_feature 1..20: note = Description of Artificial Sequence: Synthetic oligonucleotide
  misc_feature 1..20: note = Target: FXN; (+) strand; PAM type: YTN; PAM sequence: CTG
  source 1..20: mol_type = other DNA
cgcctgtcttcttggaagga

SEQ ID NO: 35712 - DNA, 20 bp, synthetic construct
  misc_feature 1..20: note = Description of Artificial Sequence: Synthetic oligonucleotide
  misc_feature 1..20: note = Target: FXN; (+) strand; PAM type: YTN; PAM sequence: CTG
  source 1..20: mol_type = other DNA
tcttcttggaaggagcaggc

SEQ ID NO: 35713 - DNA, 20 bp, synthetic construct
  misc_feature 1..20: note = Description of Artificial Sequence: Synthetic oligonucleotide
  misc_feature 1..20: note = Target: FXN; (+) strand; PAM type: YTN; PAM sequence: CTT
  source 1..20: mol_type = other DNA
cttggaaggagcaggccgga

SEQ ID NO: 35714 - DNA, 20 bp, synthetic construct
  misc_feature 1..20: note = Description of Artificial Sequence: Synthetic oligonucleotide
  misc_feature 1..20: note = Target: FXN; (+) strand; PAM type: YTN; PAM sequence: TTC
  source 1..20: mol_type = other DNA
ttggaaggagcaggccggag

SEQ ID NO: 35715 - DNA, 20 bp, synthetic construct
  misc_feature 1..20: note = Description of Artificial Sequence: Synthetic oligonucleotide
  misc_feature 1..20: note = Target: FXN; (+) strand; PAM type: YTN; PAM sequence: CTT
  source 1..20: mol_type = other DNA
ggaaggagcaggccggagcg

SEQ ID NO: 35716 - DNA, 20 bp, synthetic construct
  misc_feature 1..20: note = Description of Artificial Sequence: Synthetic oligonucleotide
  misc_feature 1..20: note = Target: FXN; (+) strand; PAM type: YTN; PAM sequence: TTG
  source 1..20: mol_type = other DNA
gaaggagcaggccggagcgc

SEQ ID NO: 35717 - DNA, 20 bp, synthetic construct
  misc_feature 1..20: note = Description of Artificial Sequence: Synthetic oligonucleotide
  misc_feature 1..20: note = Target: FXN; (+) strand; PAM type: YTN; PAM sequence: CTG
  source 1..20: mol_type = other DNA
tacctgcgaaggcacaggat

SEQ ID NO: 35718 - DNA, 20 bp, synthetic construct
  misc_feature 1..20: note = Description of Artificial Sequence: Synthetic oligonucleotide
  misc_feature 1..20: note = Target: FXN; (+) strand; PAM type: YTN; PAM sequence: CTG
  source 1..20: mol_type = other DNA
cgaaggcacaggattccgcg

SEQ ID NO: 35719 - DNA, 20 bp, synthetic construct
  misc_feature 1..20: note = Description of Artificial Sequence: Synthetic oligonucleotide
  misc_feature 1..20: note = Target: FXN; (+) strand; PAM type: YTN; PAM sequence: TTC
  source 1..20: mol_type = other DNA
cgcgggaagatcccgcagtt

SEQ ID NO: 35720 - DNA, 20 bp, synthetic construct
  misc_feature 1..20: note = Description of Artificial Sequence: Synthetic oligonucleotide
  misc_feature 1..20: note = Target: FXN; (+) strand; PAM type: YTN; PAM sequence: TTT
  source 1..20: mol_type = other DNA
cgggccgtcgtcattgtttt

SEQ ID NO: 35721 - DNA, 20 bp, synthetic construct
  misc_feature 1..20: note = Description of Artificial Sequence: Synthetic oligonucleotide
  misc_feature 1..20: note = Target: FXN; (+) strand; PAM type: YTN; PAM sequence: TTC
  source 1..20: mol_type = other DNA
gggccgtcgtcattgttttt

SEQ ID NO: 35722 - DNA, 20 bp, synthetic construct
  misc_feature 1..20: note = Description of Artificial Sequence: Synthetic oligonucleotide
  misc_feature 1..20: note = Target: FXN; (+) strand; PAM type: YTN; PAM sequence: TTG
  source 1..20: mol_type = other DNA
tttttatacctgtggcaaat

SEQ ID NO: 35723 - DNA, 20 bp, synthetic construct
  misc_feature 1..20: note = Description of Artificial Sequence: Synthetic oligonucleotide
  misc_feature 1..20: note = Target: FXN; (+) strand; PAM type: YTN; PAM sequence: TTT
  source 1..20: mol_type = other DNA
ttatacctgtggcaaatggc

SEQ ID NO: 35724 - DNA, 20 bp, synthetic construct
  misc_feature 1..20: note = Description of Artificial Sequence: Synthetic oligonucleotide
  misc_feature 1..20: note = Target: FXN; (+) strand; PAM type: YTN; PAM sequence: TTT
  source 1..20: mol_type = other DNA
tatacctgtggcaaatggca

SEQ ID NO: 35725 - DNA, 20 bp, synthetic construct
  misc_feature 1..20: note = Description of Artificial Sequence: Synthetic oligonucleotide
  misc_feature 1..20: note = Target: FXN; (+) strand; PAM type: YTN; PAM sequence: TTT
  source 1..20: mol_type = other DNA
atacctgtggcaaatggcat

SEQ ID NO: 35726 - DNA, 20 bp, synthetic construct
  misc_feature 1..20: note = Description of Artificial Sequence: Synthetic oligonucleotide
  misc_feature 1..20: note = Target: FXN; (+) strand; PAM type: YTN; PAM sequence: TTA
  source 1..20: mol_type = other DNA
tacctgtggcaaatggcatg

SEQ ID NO: 35727 - DNA, 20 bp, synthetic construct
  misc_feature 1..20: note = Description of Artificial Sequence: Synthetic oligonucleotide
  misc_feature 1..20: note = Target: FXN; (+) strand; PAM type: YTN; PAM sequence: CTG
  source 1..20: mol_type = other DNA
tggcaaatggcatgaccaga

SEQ ID NO: 35728 - DNA, 20 bp, synthetic construct
  misc_feature 1..20: note = Description of Artificial Sequence: Synthetic oligonucleotide
  misc_feature 1..20: note = Target: FXN; (+) strand; PAM type: YTN; PAM sequence: TTA
  source 1..20: mol_type = other DNA
tgtctggagaaacccctgta

SEQ ID NO: 35729 - DNA, 20 bp, synthetic construct
  misc_feature 1..20: note = Description of Artificial Sequence: Synthetic oligonucleotide
  misc_feature 1..20: note = Target: FXN; (+) strand; PAM type: YTN; PAM sequence: CTG
  source 1..20: mol_type = other DNA
gagaaacccctgtagaggag

SEQ ID NO: 35730 - DNA, 20 bp, synthetic construct
  misc_feature 1..20: note = Description of Artificial Sequence: Synthetic oligonucleotide
  misc_feature 1..20: note = Target: FXN; (+) strand; PAM type: YTN; PAM sequence: CTG
  source 1..20: mol_type = other DNA
tagaggagcaggaggttgtg

SEQ ID NO: 35731 - DNA, 20 bp, synthetic construct
  misc_feature 1..20: note = Description of Artificial Sequence: Synthetic oligonucleotide
  misc_feature 1..20: note = Target: FXN; (+) strand; PAM type: YTN; PAM sequence: TTG
  source 1..20: mol_type = other DNA
tggacatgctgtggcccgga

SEQ ID NO: 35732 - DNA, 20 bp, synthetic construct
  misc_feature 1..20: note = Description of Artificial Sequence: Synthetic oligonucleotide
  misc_feature 1..20: note = Target: FXN; (+) strand; PAM type: YTN; PAM sequence: CTG
  source 1..20: mol_type = other DNA
tggcccggacagtggctgcc

SEQ ID NO: 35733 - DNA, 20 bp, synthetic construct
  misc_feature 1..20: note = Description of Artificial Sequence: Synthetic oligonucleotide
  misc_feature 1..20: note = Target: FXN; (+) strand; PAM type: YTN; PAM sequence: CTG
  source 1..20: mol_type = other DNA
ccgagcagttggagcctgca

SEQ ID NO: 35734 - DNA, 20 bp, synthetic construct
  misc_feature 1..20: note = Description of Artificial Sequence: Synthetic oligonucleotide
  misc_feature 1..20: note = Target: FXN; (+) strand; PAM type: YTN; PAM sequence: TTG
  source 1..20: mol_type = other DNA
gagcctgcacccgcccaact

SEQ ID NO: 35735 - DNA, 20 bp, synthetic construct
  misc_feature 1..20: note = Description of Artificial Sequence: Synthetic oligonucleotide
  misc_feature 1..20: note = Target: FXN; (+) strand; PAM type: YTN; PAM sequence: CTG
  source 1..20: mol_type = other DNA
cacccgcccaacttggctaa

SEQ ID NO: 35736 - DNA, 20 bp, synthetic construct
  misc_feature 1..20: note = Description of Artificial Sequence: Synthetic oligonucleotide
  misc_feature 1..20: note = Target: FXN; (+) strand; PAM type: YTN; PAM sequence: CTT
  source 1..20: mol_type = other DNA
ggctaaagaagtccccatac

SEQ ID NO: 35737 - DNA, 20 bp, synthetic construct
  misc_feature 1..20: note = Description of Artificial Sequence: Synthetic oligonucleotide
  misc_feature 1..20: note = Target: FXN; (+) strand; PAM type: YTN; PAM sequence: TTG
  source 1..20: mol_type = other DNA
gctaaagaagtccccatact

SEQ ID NO: 35738 - DNA, 20 bp, synthetic construct
  misc_feature 1..20: note = Description of Artificial Sequence: Synthetic oligonucleotide
  misc_feature 1..20: note = Target: FXN; (+) strand; PAM type: YTN; PAM sequence: CTA
  source 1..20: mol_type = other DNA
aagaagtccccatactctct

SEQ ID NO: 35739 - DNA, 20 bp, synthetic construct
  misc_feature 1..20: note = Description of Artificial Sequence: Synthetic oligonucleotide
  misc_feature 1..20: note = Target: FXN; (+) strand; PAM type: YTN; PAM sequence: CTC
  source 1..20: mol_type = other DNA
tctgtggaaaagatttccag

SEQ ID NO: 35740 - DNA, 20 bp, synthetic construct
  misc_feature 1..20: note = Description of Artificial Sequence: Synthetic oligonucleotide
  misc_feature 1..20: note = Target: FXN; (+) strand; PAM type: YTN; PAM sequence: CTC
  source 1..20: mol_type = other DNA
tgtggaaaagatttccagaa

SEQ ID NO: 35741 - DNA, 20 bp, synthetic construct
  misc_feature 1..20: note = Description of Artificial Sequence: Synthetic oligonucleotide
  misc_feature 1..20: note = Target: FXN; (+) strand; PAM type: YTN; PAM sequence: CTG
  source 1..20: mol_type = other DNA
tggaaaagatttccagaagc

SEQ ID NO: 35742 - DNA, 20 bp, synthetic construct
  misc_feature 1..20: note = Description of Artificial Sequence: Synthetic oligonucleotide
  misc_feature 1..20: note = Target: FXN; (+) strand; PAM type: YTN; PAM sequence: TTT
  source 1..20: mol_type = other DNA
ccagaagctgttgtgtcaat

SEQ ID NO: 35743 - DNA, 20 bp, synthetic construct
  misc_feature 1..20: note = Description of Artificial Sequence: Synthetic oligonucleotide
  misc_feature 1..20: note = Target: FXN; (+) strand; PAM type: YTN; PAM sequence: TTC
  source 1..20: mol_type = other DNA
cagaagctgttgtgtcaata

SEQ ID NO: 35744 - DNA, 20 bp, synthetic construct
  misc_feature 1..20: note = Description of Artificial Sequence: Synthetic oligonucleotide
  misc_feature 1..20: note = Target: FXN; (+) strand; PAM type: YTN; PAM sequence: CTG
  source 1..20: mol_type = other DNA
ttgtgtcaatatcaaagcct

SEQ ID NO: 35745 - DNA, 20 bp, synthetic construct
  misc_feature 1..20: note = Description of Artificial Sequence: Synthetic oligonucleotide
  misc_feature 1..20: note = Target: FXN; (+) strand; PAM type: YTN; PAM sequence: TTG
  source 1..20: mol_type = other DNA
tgtcaatatcaaagcctcaa

SEQ ID NO: 35746 - DNA, 20 bp, synthetic construct
  misc_feature 1..20: note = Description of Artificial Sequence: Synthetic oligonucleotide
  misc_feature 1..20: note = Target: FXN; (+) strand; PAM type: YTN; PAM sequence: CTC
  source 1..20: mol_type = other DNA
aaaacaacaacaacaacaac

SEQ ID NO: 35747 - DNA, 20 bp, synthetic construct
  misc_feature 1..20: note = Description of Artificial Sequence: Synthetic oligonucleotide
  misc_feature 1..20: note = Target: FXN; (+) strand; PAM type: YTN; PAM sequence: TTA
  source 1..20: mol_type = other DNA
tcaacaataaagatcatcct

SEQ ID NO: 35748 - DNA, 20 bp, synthetic construct
  misc_feature 1..20: note = Description of Artificial Sequence: Synthetic oligonucleotide
  misc_feature 1..20: note = Target: FXN; (+) strand; PAM type: YTN; PAM sequence: CTT
  source 1..20: mol_type = other DNA
gagtctgctttgaaaagtag

SEQ ID NO: 35749 - DNA, 20 bp, synthetic construct
  misc_feature 1..20: note = Description of Artificial Sequence: Synthetic oligonucleotide
  misc_feature 1..20: note = Target: FXN; (+) strand; PAM type: YTN; PAM sequence: TTG
  source 1..20: mol_type = other DNA
agtctgctttgaaaagtagg

SEQ ID NO: 35750 - DNA, 20 bp, synthetic construct
  misc_feature 1..20: note = Description of Artificial Sequence: Synthetic oligonucleotide
  misc_feature 1..20: note = Target: FXN; (+) strand; PAM type: YTN; PAM sequence: CTG
  source 1..20: mol_type = other DNA
ctttgaaaagtagggtgaaa

SEQ ID NO: 35751 - DNA, 20 bp, synthetic construct
  misc_feature 1..20: note = Description of Artificial Sequence: Synthetic oligonucleotide
  misc_feature 1..20: note = Target: FXN; (+) strand; PAM type: YTN; PAM sequence: CTT
  source 1..20: mol_type = other DNA
tgaaaagtagggtgaaattc

SEQ ID NO: 35752 - DNA, 20 bp, synthetic construct
  misc_feature 1..20: note = Description of Artificial Sequence: Synthetic oligonucleotide
  misc_feature 1..20: note = Target: FXN; (+) strand; PAM type: YTN; PAM sequence: TTT
  source 1..20: mol_type = other DNA
gaaaagtagggtgaaattct

SEQ ID NO: 35753 - DNA, 20 bp, synthetic construct
  misc_feature 1..20: note = Description of Artificial Sequence: Synthetic oligonucleotide
  misc_feature 1..20: note = Target: FXN; (+) strand; PAM type: YTN; PAM sequence: TTG
  source 1..20: mol_type = other DNA
aaaagtagggtgaaattctg

SEQ ID NO: 35754 - DNA, 20 bp, synthetic construct
  misc_feature 1..20: note = Description of Artificial Sequence: Synthetic oligonucleotide
  misc_feature 1..20: note = Target: FXN; (+) strand; PAM type: YTN; PAM sequence: TTC
  source 1..20: mol_type = other DNA
tgcagaggcattcaactggc

SEQ ID NO: 35755 - DNA, 20 bp, synthetic construct
  misc_feature 1..20: note = Description of Artificial Sequence: Synthetic oligonucleotide
  misc_feature 1..20: note = Target: FXN; (+) strand; PAM type: YTN; PAM sequence: CTG
  source 1..20: mol_type = other DNA
cagaggcattcaactggcaa

SEQ ID NO: 35756 - DNA, 20 bp, synthetic construct
  misc_feature 1..20: note = Description of Artificial Sequence: Synthetic oligonucleotide
  misc_feature 1..20: note = Target: FXN; (+) strand; PAM type: YTN; PAM sequence: TTC
  source 1..20: mol_type = other DNA
aactggcaagataccaccct

SEQ ID NO: 35757 - DNA, 20 bp, synthetic construct
  misc_feature 1..20: note = Description of Artificial Sequence: Synthetic oligonucleotide
  misc_feature 1..20: note = Target: FXN; (+) strand; PAM type: YTN; PAM sequence: CTG
  source 1..20: mol_type = other DNA
gcaagataccaccctcatag

SEQ ID NO: 35758 - DNA, 20 bp, synthetic construct
  misc_feature 1..20: note = Description of Artificial Sequence: Synthetic oligonucleotide
  misc_feature 1..20: note = Target: FXN; (+) strand; PAM type: YTN; PAM sequence: CTC
  source 1..20: mol_type = other DNA
atagccagatctgcaggtct

SEQ ID NO: 35759 - DNA, 20 bp, synthetic construct
  misc_feature 1..20: note = Description of Artificial Sequence: Synthetic oligonucleotide
  misc_feature 1..20: note = Target: FXN; (+) strand; PAM type: YTN; PAM sequence: CTG
  source 1..20: mol_type = other DNA
caggtctcagccatcatgcc

SEQ ID NO: 35760 - DNA, 20 bp, synthetic construct
  misc_feature 1..20: note = Description of Artificial Sequence: Synthetic oligonucleotide
  misc_feature 1..20: note = Target: FXN; (+) strand; PAM type: YTN; PAM sequence: CTC
  source 1..20: mol_type = other DNA
agccatcatgccagggaaaa

SEQ ID NO: 35761 - DNA, 20 bp, synthetic construct
  misc_feature 1..20: note = Description of Artificial Sequence: Synthetic oligonucleotide
  misc_feature 1..20: note = Target: FXN; (+) strand; PAM type: YTN; PAM sequence: CTC
  source 1..20: mol_type = other DNA
cattcaccactcctcagctt

SEQ ID NO: 35762 - DNA, 20 bp, synthetic construct
  misc_feature 1..20: note = Description of Artificial Sequence: Synthetic oligonucleotide
  misc_feature 1..20: note = Target: FXN; (+) strand; PAM type: YTN; PAM sequence: TTC
  source 1..20: mol_type = other DNA
accactcctcagcttctgct

SEQ ID NO: 35763 - DNA, 20 bp, synthetic construct
  misc_feature 1..20: note = Description of Artificial Sequence: Synthetic oligonucleotide
  misc_feature 1..20: note = Target: FXN; (+) strand; PAM type: YTN; PAM sequence: CTC
  source 1..20: mol_type = other DNA
ctcagcttctgcttctggtt

SEQ ID NO: 35764 - DNA, 20 bp, synthetic construct
  misc_feature 1..20: note = Description of Artificial Sequence: Synthetic oligonucleotide
  misc_feature 1..20: note = Target: FXN; (+) strand; PAM type: YTN; PAM sequence: CTC
  source 1..20: mol_type = other DNA
agcttctgcttctggtttca

SEQ ID NO: 35765 - DNA, 20 bp, synthetic construct
  misc_feature 1..20: note = Description of Artificial Sequence: Synthetic oligonucleotide
  misc_feature 1..20: note = Target: FXN; (+) strand; PAM type: YTN; PAM sequence: CTT
  source 1..20: mol_type = other DNA
ctgcttctggtttcagaggt

SEQ ID NO: 35766 - DNA, 20 bp, synthetic construct
  misc_feature 1..20: note = Description of Artificial Sequence: Synthetic oligonucleotide
  misc_feature 1..20: note = Target: FXN; (+) strand; PAM type: YTN; PAM sequence: TTC
  source 1..20: mol_type = other DNA
tgcttctggtttcagaggtc

SEQ ID NO: 35767 - DNA, 20 bp, synthetic construct
  misc_feature 1..20: note = Description of Artificial Sequence: Synthetic oligonucleotide
  misc_feature 1..20: note = Target: FXN; (+) strand; PAM type: YTN; PAM sequence: CTG
  source 1..20: mol_type = other DNA
cttctggtttcagaggtctc

SEQ ID NO: 35768 - DNA, 20 bp, synthetic construct
  misc_feature 1..20: note = Description of Artificial Sequence: Synthetic oligonucleotide
  misc_feature 1..20: note = Target: FXN; (+) strand; PAM type: YTN; PAM sequence: CTT
  source 1..20: mol_type = other DNA
ctggtttcagaggtctctgt

SEQ ID NO: 35769 - DNA, 20 bp, synthetic construct
  misc_feature 1..20: note = Description of Artificial Sequence: Synthetic oligonucleotide
  misc_feature 1..20: note = Target: FXN; (+) strand; PAM type: YTN; PAM sequence: TTC
  source 1..20: mol_type = other DNA
tggtttcagaggtctctgta

SEQ ID NO: 35770 - DNA, 20 bp, synthetic construct
  misc_feature 1..20: note = Description of Artificial Sequence: Synthetic oligonucleotide
  misc_feature 1..20: note = Target: FXN; (+) strand; PAM type: YTN; PAM sequence: CTG
  source 1..20: mol_type = other DNA
gtttcagaggtctctgtatt

SEQ ID NO: 35771 - DNA, 20 bp, synthetic construct
  misc_feature 1..20: note = Description of Artificial Sequence: Synthetic oligonucleotide
  misc_feature 1..20: note = Target: FXN; (+) strand; PAM type: YTN; PAM sequence: TTT
  source 1..20: mol_type = other DNA
cagaggtctctgtattggag

SEQ ID NO: 35772 - DNA, 20 bp, synthetic construct
  misc_feature 1..20: note = Description of Artificial Sequence: Synthetic oligonucleotide
  misc_feature 1..20: note = Target: FXN; (+) strand; PAM type: YTN; PAM sequence: TTC
  source 1..20: mol_type = other DNA
agaggtctctgtattggagg

SEQ ID NO: 35773 - DNA, 20 bp, synthetic construct
  misc_feature 1..20: note = Description of Artificial Sequence: Synthetic oligonucleotide
  misc_feature 1..20: note = Target: FXN; (+) strand; PAM type: YTN; PAM sequence: CTC
  source 1..20: mol_type = other DNA
tgtattggaggggctttaaa

SEQ ID NO: 35774 - DNA, 20 bp, synthetic construct
  misc_feature 1..20: note = Description of Artificial Sequence: Synthetic oligonucleotide
  misc_feature 1..20: note = Target: FXN; (+) strand; PAM type: YTN; PAM sequence: CTG
  source 1..20: mol_type = other DNA
tattggaggggctttaaagc

SEQ ID NO: 35775 - DNA, 20 bp, synthetic construct
  misc_feature 1..20: note = Description of Artificial Sequence: Synthetic oligonucleotide
  misc_feature 1..20: note = Target: FXN; (+) strand; PAM type: YTN; PAM sequence: TTG
  source 1..20: mol_type = other DNA
gaggggctttaaagcaagaa

SEQ ID NO: 35776 - DNA, 20 bp, synthetic construct
  misc_feature 1..20: note = Description of Artificial Sequence: Synthetic oligonucleotide
  misc_feature 1..20: note = Target: FXN; (+) strand; PAM type: YTN; PAM sequence: CTT
  source 1..20: mol_type = other DNA
taaagcaagaagggtcttta

SEQ ID NO: 35777 - DNA, 20 bp, synthetic construct
  misc_feature 1..20: note = Description of Artificial Sequence: Synthetic oligonucleotide
  misc_feature 1..20: note = Target: FXN; (+) strand; PAM type: YTN; PAM sequence: TTT
  source 1..20: mol_type = other DNA
aaagcaagaagggtctttac

SEQ ID NO: 35778 - DNA, 20 bp, synthetic construct
  misc_feature 1..20: note = Description of Artificial Sequence: Synthetic oligonucleotide
  misc_feature 1..20: note = Target: FXN; (+) strand; PAM type: YTN; PAM sequence: TTA
  source 1..20: mol_type = other DNA
aagcaagaagggtctttacc

SEQ ID NO: 35779 - DNA, 20 bp, synthetic construct
  misc_feature 1..20: note = Description of Artificial Sequence: Synthetic oligonucleotide
  misc_feature 1..20: note = Target: FXN; (+) strand; PAM type: YTN; PAM sequence: CTT
  source 1..20: mol_type = other DNA
tacccacttactcttattca

SEQ ID NO: 35780 - DNA, 20 bp, synthetic construct
  misc_feature 1..20: note = Description of Artificial Sequence: Synthetic oligonucleotide
  misc_feature 1..20: note = Target: FXN; (+) strand; PAM type: YTN; PAM sequence: TTT
  source 1..20: mol_type = other DNA
acccacttactcttattcac

SEQ ID NO: 35781 - DNA, 20 bp, synthetic construct
  misc_feature 1..20: note = Description of Artificial Sequence: Synthetic oligonucleotide
  misc_feature 1..20: note = Target: FXN; (+) strand; PAM type: YTN; PAM sequence: TTA
  source 1..20: mol_type = other DNA
cccacttactcttattcaca

SEQ ID NO: 35782 - DNA, 20 bp, synthetic construct
  misc_feature 1..20: note = Description of Artificial Sequence: Synthetic oligonucleotide
  misc_feature 1..20: note = Target: FXN; (+) strand; PAM type: YTN; PAM sequence: CTT
  source 1..20: mol_type = other DNA
actcttattcacagatgtga

SEQ ID NO: 35783 - DNA, 20 bp, synthetic construct
  misc_feature 1..20: note = Description of Artificial Sequence: Synthetic oligonucleotide
  misc_feature 1..20: note = Target: FXN; (+) strand; PAM type: YTN; PAM sequence: TTA
  source 1..20: mol_type = other DNA
ctcttattcacagatgtgaa

SEQ ID NO: 35784 - DNA, 20 bp, synthetic construct
  misc_feature 1..20: note = Description of Artificial Sequence: Synthetic oligonucleotide
  misc_feature 1..20: note = Target: FXN; (+) strand; PAM type: YTN; PAM sequence: CTC
  source 1..20: mol_type = other DNA
ttattcacagatgtgaatat

SEQ ID NO: 35785 - DNA, 20 bp, synthetic construct
  misc_feature 1..20: note = Description of Artificial Sequence: Synthetic oligonucleotide
  misc_feature 1..20: note = Target: FXN; (+) strand; PAM type: YTN; PAM sequence: CTT
  source 1..20: mol_type = other DNA
attcacagatgtgaatatgc

SEQ ID NO: 35786 - DNA, 20 bp, synthetic construct
  misc_feature 1..20: note = Description of Artificial Sequence: Synthetic oligonucleotide
  misc_feature 1..20: note = Target: FXN; (+) strand; PAM type: YTN; PAM sequence: TTA
  source 1..20: mol_type = other DNA
ttcacagatgtgaatatgca

SEQ ID NO: 35787 - DNA, 20 bp, synthetic construct
  misc_feature 1..20: note = Description of Artificial Sequence: Synthetic oligonucleotide
  misc_feature 1..20: note = Target: FXN; (+) strand; PAM type: YTN; PAM sequence: TTC
  source 1..20: mol_type = other DNA
acagatgtgaatatgcaggt

SEQ ID NO: 35788 - DNA, 20 bp, synthetic construct
  misc_feature 1..20: note = Description of Artificial Sequence: Synthetic oligonucleotide
  misc_feature 1..20: note = Target: FXN; (+) strand; PAM type: YTN; PAM sequence: CTA
  source 1..20: mol_type = other DNA
agtcagaatagagtcaacaa

SEQ ID NO: 35789 - DNA, 20 bp, synthetic construct
  misc_feature 1..20: note = Description of Artificial Sequence: Synthetic oligonucleotide
  misc_feature 1..20: note = Target: FXN; (+) strand; PAM type: YTN; PAM sequence: CTT
  source 1..20: mol_type = other DNA
agcctctagtgtataatggg

SEQ ID NO: 35790 - DNA, 20 bp, synthetic construct
  misc_feature 1..20: note = Description of Artificial Sequence: Synthetic oligonucleotide
  misc_feature 1..20: note = Target: FXN; (+) strand; PAM type: YTN; PAM sequence: TTA
  source 1..20: mol_type = other DNA
gcctctagtgtataatgggc

SEQ ID NO: 35791 - DNA, 20 bp, synthetic construct
  misc_feature 1..20: note = Description of Artificial Sequence: Synthetic oligonucleotide
  misc_feature 1..20: note = Target: FXN; (+) strand; PAM type: YTN; PAM sequence: CTC
  source 1..20: mol_type = other DNA
tagtgtataatgggcattga

SEQ ID NO: 35792 - DNA, 20 bp, synthetic construct
  misc_feature 1..20: note = Description of Artificial Sequence: Synthetic oligonucleotide
  misc_feature 1..20: note = Target: FXN; (+) strand; PAM type: YTN; PAM sequence: CTA
  source 1..20: mol_type = other DNA
gtgtataatgggcattgatg

SEQ ID NO: 35793 - DNA, 20 bp, synthetic construct
  misc_feature 1..20: note = Description of Artificial Sequence: Synthetic oligonucleotide
  misc_feature 1..20: note = Target: FXN; (+) strand; PAM type: YTN; PAM sequence: TTG
  source 1..20: mol_type = other DNA
atgagctactggaaatacag

SEQ ID NO: 35794 - DNA, 20 bp, synthetic construct
  misc_feature 1..20: note = Description of Artificial Sequence: Synthetic oligonucleotide
  misc_feature 1..20: note = Target: FXN; (+) strand; PAM type: YTN; PAM sequence: CTA
  source 1..20: mol_type = other DNA
ctggaaatacagagatgaag

SEQ ID NO: 35795 - DNA, 20 bp, synthetic construct
  misc_feature 1..20: note = Description of Artificial Sequence: Synthetic oligonucleotide
  misc_feature 1..20: note = Target: FXN; (+) strand; PAM type: YTN; PAM sequence: CTG
  source 1..20: mol_type = other DNA
gaaatacagagatgaagaaa

SEQ ID NO: 35796 - DNA, 20 bp, synthetic construct
  misc_feature 1..20: note = Description of Artificial Sequence: Synthetic oligonucleotide
  misc_feature 1..20: note = Target: FXN; (+) strand; PAM type: YTN; PAM sequence: CTT
  source 1..20: mol_type = other DNA
caaggagctcaatctagcaa

SEQ ID NO: 35797 - DNA, 20 bp, synthetic construct
  misc_feature 1..20: note = Description of Artificial Sequence: Synthetic oligonucleotide
  misc_feature 1..20: note = Target: FXN; (+) strand; PAM type: YTN; PAM sequence: TTC
  source 1..20: mol_type = other DNA
aaggagctcaatctagcaag

SEQ ID NO: 35798 - DNA, 20 bp, synthetic construct
  misc_feature 1..20: note = Description of Artificial Sequence: Synthetic oligonucleotide
  misc_feature 1..20: note = Target: FXN; (+) strand; PAM type: YTN; PAM sequence: CTC
  source 1..20: mol_type = other DNA
aatctagcaagggagacaga

SEQ ID NO: 35799 - DNA, 20 bp, synthetic construct
  misc_feature 1..20: note = Description of Artificial Sequence: Synthetic oligonucleotide
  misc_feature 1..20: note = Target: FXN; (+) strand; PAM type: YTN; PAM sequence: CTA
  source 1..20: mol_type = other DNA
gcaagggagacagactcttt

SEQ ID NO: 35800 - DNA, 20 bp, synthetic construct
  misc_feature 1..20: note = Description of Artificial Sequence: Synthetic oligonucleotide
  misc_feature 1..20: note = Target: FXN; (+) strand; PAM type: YTN; PAM sequence: CTC
  source 1..20: mol_type = other DNA
tttgtaggtgggaccgggct

SEQ ID NO: 35801 - DNA, 20 bp, synthetic construct
  misc_feature 1..20: note = Description of Artificial Sequence: Synthetic oligonucleotide
  misc_feature 1..20: note = Target: FXN; (+) strand; PAM type: YTN; PAM sequence: CTT
  source 1..20: mol_type = other DNA
tgtaggtgggaccgggcttc

SEQ ID NO: 35802 - DNA, 20 bp, synthetic construct
  misc_feature 1..20: note = Description of Artificial Sequence: Synthetic oligonucleotide
  misc_feature 1..20: note = Target: FXN; (+) strand; PAM type: YTN; PAM sequence: TTT
  source 1..20: mol_type = other DNA
gtaggtgggaccgggcttcc

SEQ ID NO: 35803 - DNA, 20 bp, synthetic construct
  misc_feature 1..20: note = Description of Artificial Sequence: Synthetic oligonucleotide
  misc_feature 1..20: note = Target: FXN; (+) strand; PAM type: YTN; PAM sequence: TTG
  source 1..20: mol_type = other DNA
taggtgggaccgggcttccc

SEQ ID NO: 35804 - DNA, 20 bp, synthetic construct
  misc_feature 1..20: note = Description of Artificial Sequence: Synthetic oligonucleotide
  misc_feature 1..20: note = Target: FXN; (+) strand; PAM type: YTN; PAM sequence: CTT
  source 1..20: mol_type = other DNA
ccctgcagcagaaggaagct

SEQ ID NO: 35805 - DNA, 20 bp, synthetic construct
  misc_feature 1..20: note = Description of Artificial Sequence: Synthetic oligonucleotide
  misc_feature 1..20: note = Target: FXN; (+) strand; PAM type: YTN; PAM sequence: TTC
  source 1..20: mol_type = other DNA
cctgcagcagaaggaagctt

SEQ ID NO: 35806 - DNA, 20 bp, synthetic construct
  misc_feature 1..20: note = Description of Artificial Sequence: Synthetic oligonucleotide
  misc_feature 1..20: note = Target: FXN; (+) strand; PAM type: YTN; PAM sequence: CTG
  source 1..20: mol_type = other DNA
cagcagaaggaagcttgaaa

SEQ ID NO: 35807 - DNA, 20 bp, synthetic construct
  misc_feature 1..20: note = Description of Artificial Sequence: Synthetic oligonucleotide
  misc_feature 1..20: note = Target: FXN; (+) strand; PAM type: YTN; PAM sequence: CTT
  source 1..20: mol_type = other DNA
gaaattggtaacgagcctca

SEQ ID NO: 35808 - DNA, 20 bp, synthetic construct
  misc_feature 1..20: note = Description of Artificial Sequence: Synthetic oligonucleotide
  misc_feature 1..20: note = Target: FXN; (+) strand; PAM type: YTN; PAM sequence: TTG
  source 1..20: mol_type = other DNA
aaattggtaacgagcctcag

SEQ ID NO: 35809 - DNA, 20 bp, synthetic construct
  misc_feature 1..20: note = Description of Artificial Sequence: Synthetic oligonucleotide
  misc_feature 1..20: note = Target: FXN; (+) strand; PAM type: YTN; PAM sequence: TTG
  source 1..20: mol_type = other DNA
gtaacgagcctcagaaggga

SEQ ID NO: 35810 - DNA, 20 bp, synthetic construct
  misc_feature 1..20: note = Description of Artificial Sequence: Synthetic oligonucleotide
  misc_feature 1..20: note = Target: FXN; (+) strand; PAM type: YTN; PAM sequence: CTC
  source 1..20: mol_type = other DNA
agaagggacagaggcaggcc

SEQ ID NO: 35811 - DNA, 20 bp, synthetic construct
  misc_feature 1..20: note = Description of Artificial Sequence: Synthetic oligonucleotide
  misc_feature 1..20: note = Target: FXN; (+) strand; PAM type: YTN; PAM sequence: CTA
  source 1..20: mol_type = other DNA
ccctgagaggatcgcatgtg

SEQ ID NO: 35812 - DNA, 20 bp, synthetic construct
  misc_feature 1..20: note = Description of Artificial Sequence: Synthetic oligonucleotide
  misc_feature 1..20: note = Target: FXN; (+) strand; PAM type: YTN; PAM sequence: CTG
  source 1..20: mol_type = other DNA
agaggatcgcatgtggacac

SEQ ID NO: 35813 - DNA, 20 bp, synthetic construct
  misc_feature 1..20: note = Description of Artificial Sequence: Synthetic oligonucleotide
  misc_feature 1..20: note = Target: FXN; (+) strand; PAM type: YTN; PAM sequence: CTA
  source 1..20: mol_type = other DNA
tgacctggccctgctttgac

SEQ ID NO: 35814 - DNA, 20 bp, synthetic construct
  misc_feature 1..20: note = Description of Artificial Sequence: Synthetic oligonucleotide
  misc_feature 1..20: note = Target: FXN; (+) strand; PAM type: YTN; PAM sequence: CTG
  source 1..20: mol_type = other DNA
gccctgctttgacccactag

SEQ ID NO: 35815 - DNA, 20 bp, synthetic construct
  misc_feature 1..20: note = Description of Artificial Sequence: Synthetic oligonucleotide
  misc_feature 1..20: note = Target: FXN; (+) strand; PAM type: YTN; PAM sequence: CTG
  source 1..20: mol_type = other DNA
ctttgacccactagctgtgc

SEQ ID NO: 35816 - DNA, 20 bp, synthetic construct
  misc_feature 1..20: note = Description of Artificial Sequence: Synthetic oligonucleotide
  misc_feature 1..20: note = Target: FXN; (+) strand; PAM type: YTN; PAM sequence: CTT
  source 1..20: mol_type = other DNA
tgacccactagctgtgctgt

SEQ ID NO: 35817 - DNA, 20 bp, synthetic construct
  misc_feature 1..20: note = Description of Artificial Sequence: Synthetic oligonucleotide
  misc_feature 1..20: note = Target: FXN; (+) strand; PAM type: YTN; PAM sequence: TTT
  source 1..20: mol_type = other DNA
gacccactagctgtgctgta

SEQ ID NO: 35818 - DNA, 20 bp, synthetic construct
  misc_feature 1..20: note = Description of Artificial Sequence: Synthetic oligonucleotide
  misc_feature 1..20: note = Target: FXN; (+) strand; PAM type: YTN; PAM sequence: TTG
  source 1..20: mol_type = other DNA
acccactagctgtgctgtag

SEQ ID NO: 35819 - DNA, 20 bp, synthetic construct
  misc_feature 1..20: note = Description of Artificial Sequence: Synthetic oligonucleotide
  misc_feature 1..20: note = Target: FXN; (+) strand; PAM type: YTN; PAM sequence: CTA
  source 1..20: mol_type = other DNA
gctgtgctgtagggccaggt

SEQ ID NO: 35820 - DNA, 20 bp, synthetic construct
  misc_feature 1..20: note = Description of Artificial Sequence: Synthetic oligonucleotide
  misc_feature 1..20: note = Target: FXN; (+) strand; PAM type: YTN; PAM sequence: CTG
  source 1..20: mol_type = other DNA
tgctgtagggccaggtggag

SEQ ID NO: 35821 - DNA, 20 bp, synthetic construct
  misc_feature 1..20: note = Description of Artificial Sequence: Synthetic oligonucleotide
  misc_feature 1..20: note = Target: FXN; (+) strand; PAM type: YTN; PAM sequence: CTG
  source 1..20: mol_type = other DNA
tagggccaggtggagcctgg

SEQ ID NO: 35822 - DNA, 20 bp, synthetic construct
  misc_feature 1..20: note = Description of Artificial Sequence: Synthetic oligonucleotide
  misc_feature 1..20: note = Target: FXN; (+) strand; PAM type: YTN; PAM sequence: CTG
  source 1..20: mol_type = other DNA
gagtggcctgtgctaagggg

SEQ ID NO: 35823 - DNA, 20 bp, synthetic construct
  misc_feature 1..20: note = Description of Artificial Sequence: Synthetic oligonucleotide
  misc_feature 1..20: note = Target: FXN; (+) strand; PAM type: YTN; PAM sequence: CTG
  source 1..20: mol_type = other DNA
tgctaaggggctactatgag

SEQ ID NO: 35824 - DNA, 20 bp, synthetic construct
  misc_feature 1..20: note = Description of Artificial Sequence: Synthetic oligonucleotide
  misc_feature 1..20: note = Target: FXN; (+) strand; PAM type: YTN; PAM sequence: CTA
  source 1..20: mol_type = other DNA
aggggctactatgagctctt

SEQ ID NO: 35825 - DNA, 20 bp, synthetic construct
  misc_feature 1..20: note = Description of Artificial Sequence: Synthetic oligonucleotide
  misc_feature 1..20: note = Target: FXN; (+) strand; PAM type: YTN; PAM sequence: CTA
  source 1..20: mol_type = other DNA
ctatgagctctttccactcc

SEQ ID NO: 35826 - DNA, 20 bp, synthetic construct
  misc_feature 1..20: note = Description of Artificial Sequence: Synthetic oligonucleotide
  misc_feature 1..20: note = Target: FXN; (+) strand; PAM type: YTN; PAM sequence: CTA
  source 1..20: mol_type = other DNA
tgagctctttccactccccc

SEQ ID NO: 35827 - DNA, 20 bp, synthetic construct
  misc_feature 1..20: note = Description of Artificial Sequence: Synthetic oligonucleotide
  misc_feature 1..20: note = Target: FXN; (+) strand; PAM type: YTN; PAM sequence: CTC
  source 1..20: mol_type = other DNA
tttccactcccccaaggcat

SEQ ID NO: 35828 - DNA, 20 bp, synthetic construct
  misc_feature 1..20: note = Description of Artificial Sequence: Synthetic oligonucleotide
  misc_feature 1..20: note = Target: FXN; (+) strand; PAM type: YTN; PAM sequence: CTT
  source 1..20: mol_type = other DNA
tccactcccccaaggcattg

SEQ ID NO: 35829 - DNA, 20 bp, synthetic construct
  misc_feature 1..20: note = Description of Artificial Sequence: Synthetic oligonucleotide
  misc_feature 1..20: note = Target: FXN; (+) strand; PAM type: YTN; PAM sequence: TTT
  source 1..20: mol_type = other DNA
ccactcccccaaggcattgc

SEQ ID NO: 35830 - DNA, 20 bp, synthetic construct
  misc_feature 1..20: note = Description of Artificial Sequence: Synthetic oligonucleotide
  misc_feature 1..20: note = Target: FXN; (+) strand; PAM type: YTN; PAM sequence: TTC
  source 1..20: mol_type = other DNA
cactcccccaaggcattgca

SEQ ID NO: 35831 - DNA, 20 bp, synthetic construct
  misc_feature 1..20: note = Description of Artificial Sequence: Synthetic oligonucleotide
  misc_feature 1..20: note = Target: FXN; (+) strand; PAM type: YTN; PAM sequence: CTC
  source 1..20: mol_type = other DNA
ccccaaggcattgcataaat

SEQ ID NO: 35832 - DNA, 20 bp, synthetic construct
  misc_feature 1..20: note = Description of Artificial Sequence: Synthetic oligonucleotide
  misc_feature 1..20: note = Target: FXN; (+) strand; PAM type: YTN; PAM sequence: TTG
  source 1..20: mol_type = other DNA
cataaataatgtcactttct

SEQ ID NO: 35833 - DNA, 20 bp, synthetic construct
  misc_feature 1..20: note = Description of Artificial Sequence: Synthetic oligonucleotide
  misc_feature 1..20: note = Target: FXN; (+) strand; PAM type: YTN; PAM sequence: CTT
  source 1..20: mol_type = other DNA
tctgtttgcacagcaaaatc

SEQ ID NO: 35834 - DNA, 20 bp, synthetic construct
  misc_feature 1..20: note = Description of Artificial Sequence: Synthetic oligonucleotide
  misc_feature 1..20: note = Target: FXN; (+) strand; PAM type: YTN; PAM sequence: TTT
  source 1..20: mol_type = other DNA
ctgtttgcacagcaaaatca

SEQ ID NO: 35835 - DNA, 20 bp, synthetic construct
  misc_feature 1..20: note = Description of Artificial Sequence: Synthetic oligonucleotide
  misc_feature 1..20: note = Target: FXN; (+) strand; PAM type: YTN; PAM sequence: TTC
  source 1..20: mol_type = other DNA
tgtttgcacagcaaaatcag

SEQ ID NO: 35836 - DNA, 20 bp, synthetic construct
  misc_feature 1..20: note = Description of Artificial Sequence: Synthetic oligonucleotide
  misc_feature 1..20: note = Target: FXN; (+) strand; PAM type: YTN; PAM sequence: CTG
  source 1..20: mol_type = other DNA
tttgcacagcaaaatcaggg

SEQ ID NO: 35837 - DNA, 20 bp, synthetic construct
  misc_feature 1..20: note = Description of Artificial Sequence: Synthetic oligonucleotide
  misc_feature 1..20: note = Target: FXN; (+) strand; PAM type: YTN; PAM sequence: TTT
  source 1..20: mol_type = other DNA
gcacagcaaaatcagggaca

SEQ ID NO: 35838 - DNA, 20 bp, synthetic construct
  misc_feature 1..20: note = Description of Artificial Sequence: Synthetic oligonucleotide
  misc_feature 1..20: note = Target: FXN; (+) strand; PAM type: YTN; PAM sequence: TTG
  source 1..20: mol_type = other DNA
cacagcaaaatcagggacac

SEQ ID NO: 35839 - DNA, 20 bp, synthetic construct
  misc_feature 1..20: note = Description of Artificial Sequence: Synthetic oligonucleotide
  misc_feature 1..20: note = Target: FXN; (+) strand; PAM type: YTN; PAM sequence: TTT
  source 1..20: mol_type = other DNA
tctagaacatggggtgcctc

SEQ ID NO: 35840 - DNA, 20 bp, synthetic construct
  misc_feature 1..20: note = Description of Artificial Sequence: Synthetic oligonucleotide
  misc_feature 1..20: note = Target: FXN; (+) strand; PAM type: YTN; PAM sequence: TTT
  source 1..20: mol_type = other DNA
ctagaacatggggtgcctcc

SEQ ID NO: 35841 - DNA, 20 bp, synthetic construct
  misc_feature 1..20: note = Description of Artificial Sequence: Synthetic oligonucleotide
  misc_feature 1..20: note = Target: FXN; (+) strand; PAM type: YTN; PAM sequence: TTC
  source 1..20: mol_type = other DNA
tagaacatggggtgcctccc

SEQ ID NO: 35842 - DNA, 20 bp, synthetic construct
  misc_feature 1..20: note = Description of Artificial Sequence: Synthetic oligonucleotide
  misc_feature 1..20: note = Target: FXN; (+) strand; PAM type: YTN; PAM sequence: CTA
  source 1..20: mol_type = other DNA
gaacatggggtgcctcccct

SEQ ID NO: 35843 - DNA, 20 bp, synthetic construct
  misc_feature 1..20: note = Description of Artificial Sequence: Synthetic oligonucleotide
  misc_feature 1..20: note = Target: FXN; (+) strand; PAM type: YTN; PAM sequence: CTC
  source 1..20: mol_type = other DNA
ccctccccccagcccaacag

SEQ ID NO: 35844 - DNA, 20 bp, synthetic construct
  misc_feature 1..20: note = Description of Artificial Sequence: Synthetic oligonucleotide
  misc_feature 1..20: note = Target: FXN; (+) strand; PAM type: YTN; PAM sequence: CTC
  source 1..20: mol_type = other DNA
cccccagcccaacagaagtt

SEQ ID NO: 35845 - DNA, 20 bp, synthetic construct
  misc_feature 1..20: note = Description of Artificial Sequence: Synthetic oligonucleotide
  misc_feature 1..20: note = Target: FXN; (+) strand; PAM type: YTN; PAM sequence: TTC
  source 1..20: mol_type = other DNA
tacaatgactgatgggccct

SEQ ID NO: 35846 - DNA, 20 bp, synthetic construct
  misc_feature 1..20: note = Description of Artificial Sequence: Synthetic oligonucleotide
  misc_feature 1..20: note = Target: FXN; (+) strand; PAM type: YTN; PAM sequence: CTA
  source 1..20: mol_type = other DNA
caatgactgatgggcccttg

SEQ ID NO: 35847 - DNA, 20 bp, synthetic construct
  misc_feature 1..20: note = Description of Artificial Sequence: Synthetic oligonucleotide
  misc_feature 1..20: note = Target: FXN; (+) strand; PAM type: YTN; PAM sequence: CTG
  source 1..20: mol_type = other DNA
atgggcccttgtttttgttt

SEQ ID NO: 35848 - DNA, 20 bp, synthetic construct
  misc_feature 1..20: note = Description of Artificial Sequence: Synthetic oligonucleotide
  misc_feature 1..20: note = Target: FXN; (+) strand; PAM type: YTN; PAM sequence: CTT
  source 1..20: mol_type = other DNA
gtttttgtttgagacggaac

SEQ ID NO: 35849 - DNA, 20 bp, synthetic construct
  misc_feature 1..20: note = Description of Artificial Sequence: Synthetic oligonucleotide
  misc_feature 1..20: note = Target: FXN; (+) strand; PAM type: YTN; PAM sequence: TTG
  source 1..20: mol_type = other DNA
tttttgtttgagacggaaca

SEQ ID NO: 35850 - DNA, 20 bp, synthetic construct
  misc_feature 1..20: note = Description of Artificial Sequence: Synthetic oligonucleotide
  misc_feature 1..20: note = Target: FXN; (+) strand; PAM type: YTN; PAM sequence: TTT
  source 1..20: mol_type = other DNA
ttgtttgagacggaacaccc

SEQ ID NO: 35851 - DNA, 20 bp, synthetic construct
  misc_feature 1..20: note = Description of Artificial Sequence: Synthetic oligonucleotide
  misc_feature 1..20: note = Target: FXN; (+) strand; PAM type: YTN; PAM sequence: TTT
  source 1..20: mol_type = other DNA
tgtttgagacggaacacccc

SEQ ID NO: 35852 - DNA, 20 bp, synthetic construct
  misc_feature 1..20: note = Description of Artificial Sequence: Synthetic oligonucleotide
  misc_feature 1..20: note = Target: FXN; (+) strand; PAM type: YTN; PAM sequence: TTT
  source 1..20: mol_type = other DNA
gtttgagacggaacacccca

SEQ ID NO: 35853 - DNA, 20 bp, synthetic construct
  misc_feature 1..20: note = Description of Artificial Sequence: Synthetic oligonucleotide
  misc_feature 1..20: note = Target: FXN; (+) strand; PAM type: YTN; PAM sequence: TTG
  source 1..20: mol_type = other DNA
tttgagacggaacaccccac

SEQ ID NO: 35854 - DNA, 20 bp, synthetic construct
  misc_feature 1..20: note = Description of Artificial Sequence: Synthetic oligonucleotide
  misc_feature 1..20: note = Target: FXN; (+) strand; PAM type: YTN; PAM sequence: TTT
  source 1..20: mol_type = other DNA
gagacggaacaccccacagg

SEQ ID NO: 35855 - DNA, 20 bp, synthetic construct
  misc_feature 1..20: note = Description of Artificial Sequence: Synthetic oligonucleotide
  misc_feature 1..20: note = Target: FXN; (+) strand; PAM type: YTN; PAM sequence: TTG
  source 1..20: mol_type = other DNA
agacggaacaccccacaggg

SEQ ID NO: 35856 - DNA, 20 bp, synthetic construct
  misc_feature 1..20: note = Description of Artificial Sequence: Synthetic oligonucleotide
  misc_feature 1..20: note = Target: FXN; (+) strand; PAM type: YTN; PAM sequence: TTC
  source 1..20: mol_type = other DNA
cgagtggtgatttgtggccc

SEQ ID NO: 35857 - DNA, 20 bp, synthetic construct
  misc_feature 1..20: note = Description of Artificial Sequence: Synthetic oligonucleotide
  misc_feature 1..20: note = Target: FXN; (+) strand; PAM type: YTN; PAM sequence: TTT
  source 1..20: mol_type = other DNA
gtggcccacaggccactggc

SEQ ID NO: 35858 - DNA, 20 bp, synthetic construct
  misc_feature 1..20: note = Description of Artificial Sequence: Synthetic oligonucleotide
  misc_feature 1..20: note = Target: FXN; (+) strand; PAM type: YTN; PAM sequence: TTG
  source 1..20: mol_type = other DNA
tggcccacaggccactggca

SEQ ID NO: 35859 - DNA, 20 bp, synthetic construct
  misc_feature 1..20: note = Description of Artificial Sequence: Synthetic oligonucleotide
  misc_feature 1..20: note = Target: FXN; (+) strand; PAM type: YTN; PAM sequence: CTG
  source 1..20: mol_type = other DNA
gcaagtggaggcagagctgc

SEQ ID NO: 35860 - DNA, 20 bp, synthetic construct
  misc_feature 1..20: note = Description of Artificial Sequence: Synthetic oligonucleotide
  misc_feature 1..20: note = Target: FXN; (+) strand; PAM type: YTN; PAM sequence: CTG
  source 1..20: mol_type = other DNA
cagagccctcgggagccaca

SEQ ID NO: 35861 - DNA, 20 bp, synthetic construct
  misc_feature 1..20: note = Description of Artificial Sequence: Synthetic oligonucleotide
  misc_feature 1..20: note = Target: FXN; (+) strand; PAM type: YTN; PAM sequence: CTC
  source 1..20: mol_type = other DNA
gggagccacagagggcctgc

SEQ ID NO: 35862 - DNA, 20 bp, synthetic construct
  misc_feature 1..20: note = Description of Artificial Sequence: Synthetic oligonucleotide
  misc_feature 1..20: note = Target: FXN; (+) strand; PAM type: YTN; PAM sequence: CTG
  source 1..20: mol_type = other DNA
ctggccgccacgacatgcca

SEQ ID NO: 35863 - DNA, 20 bp, synthetic construct
  misc_feature 1..20: note = Description of Artificial Sequence: Synthetic oligonucleotide
  misc_feature 1..20: note = Target: FXN; (+) strand; PAM type: YTN; PAM sequence: CTG
  source 1..20: mol_type = other DNA
gccgccacgacatgccaact

SEQ ID NO: 35864 - DNA, 20 bp, synthetic construct
  misc_feature 1..20: note = Description of Artificial Sequence: Synthetic oligonucleotide
  misc_feature 1..20: note = Target: FXN; (+) strand; PAM type: YTN; PAM sequence: CTC
  source 1..20: mol_type = other DNA
agctgctgctggccctcctg

SEQ ID NO: 35865 - DNA, 20 bp, synthetic construct
  misc_feature 1..20: note = Description of Artificial Sequence: Synthetic oligonucleotide
  misc_feature 1..20: note = Target: FXN; (+) strand; PAM type: YTN; PAM sequence: CTG
  source 1..20: mol_type = other DNA
ctgctggccctcctgtgggc

SEQ ID NO: 35866 - DNA, 20 bp, synthetic construct
  misc_feature 1..20: note = Description of Artificial Sequence: Synthetic oligonucleotide
  misc_feature 1..20: note = Target: FXN; (+) strand; PAM type: YTN; PAM sequence: CTG
  source 1..20: mol_type = other DNA
ctggccctcctgtgggcggc

SEQ ID NO: 35867 - DNA, 20 bp, synthetic construct
  misc_feature 1..20: note = Description of Artificial Sequence: Synthetic oligonucleotide
  misc_feature 1..20: note = Target: FXN; (+) strand; PAM type: YTN; PAM sequence: CTG
  source 1..20: mol_type = other DNA
gccctcctgtgggcggcagt

SEQ ID NO: 35868 - DNA, 20 bp, synthetic construct
  misc_feature 1..20: note = Description of Artificial Sequence: Synthetic oligonucleotide
  misc_feature 1..20: note = Target: FXN; (+) strand; PAM type: YTN; PAM sequence: CTC
  source 1..20: mol_type = other DNA
ctgtgggcggcagtgctagt

SEQ ID NO: 35869 - DNA, 20 bp, synthetic construct
  misc_feature 1..20: note = Description of Artificial Sequence: Synthetic oligonucleotide
  misc_feature 1..20: note = Target: FXN; (+) strand; PAM type: YTN; PAM sequence: CTG
  source 1..20: mol_type = other DNA
tgggcggcagtgctagtgat

SEQ ID NO: 35870 - DNA, 20 bp, synthetic construct
  misc_feature 1..20: note = Description of Artificial Sequence: Synthetic oligonucleotide
  misc_feature 1..20: note = Target: FXN; (+) strand; PAM type: YTN; PAM sequence: CTA
  source 1..20: mol_type = other DNA
gtgatgtgcagaatcttagg

SEQ ID NO: 35871 - DNA, 20 bp, synthetic construct
  misc_feature 1..20: note = Description of Artificial Sequence: Synthetic oligonucleotide
  misc_feature 1..20: note = Target: FXN; (+) strand; PAM type: YTN; PAM sequence: CTT
  source 1..20: mol_type = other DNA
aggactagtgccaaggaacc

SEQ ID NO: 35872 - DNA, 20 bp, synthetic construct
  misc_feature 1..20: note = Description of Artificial Sequence: Synthetic oligonucleotide
  misc_feature 1..20: note = Target: FXN; (+) strand; PAM type: YTN; PAM sequence: TTA
  source 1..20: mol_type = other DNA
ggactagtgccaaggaacct

SEQ ID NO: 35873 - DNA, 20 bp, synthetic construct
  misc_feature 1..20: note = Description of Artificial Sequence: Synthetic oligonucleotide
  misc_feature 1..20: note = Target: FXN; (+) strand; PAM type: YTN; PAM sequence: CTA
  source 1..20: mol_type = other DNA
gtgccaaggaacctataaat

SEQ ID NO: 35874 - DNA, 20 bp, synthetic construct
  misc_feature 1..20: note = Description of Artificial Sequence: Synthetic oligonucleotide
  misc_feature 1..20: note = Target: FXN; (+) strand; PAM type: YTN; PAM sequence: CTA
  source 1..20: mol_type = other DNA
taaataccctgggtgaccca

SEQ ID NO: 35875 - DNA, 20 bp, synthetic construct
  misc_feature 1..20: note = Description of Artificial Sequence: Synthetic oligonucleotide
  misc_feature 1..20: note = Target: FXN; (+) strand; PAM type: YTN; PAM sequence: CTG
  source 1..20: mol_type = other DNA
ggtgacccaggcgtgcactg

SEQ ID NO: 35876 - DNA, 20 bp, synthetic construct
  misc_feature 1..20: note = Description of Artificial Sequence: Synthetic oligonucleotide
  misc_feature 1..20: note = Target: FXN; (+) strand; PAM type: YTN; PAM sequence: CTG
  source 1..20: mol_type = other DNA
ctgtggtggccttcacagtc

SEQ ID NO: 35877 - DNA, 20 bp, synthetic construct
  misc_feature 1..20: note = Description of Artificial Sequence: Synthetic oligonucleotide
  misc_feature 1..20: note = Target: FXN; (+) strand; PAM type: YTN; PAM sequence: CTG
  source 1..20: mol_type = other DNA
tggtggccttcacagtcaga

SEQ ID NO: 35878 - DNA, 20 bp, synthetic construct
  misc_feature 1..20: note = Description of Artificial Sequence: Synthetic oligonucleotide
  misc_feature 1..20: note = Target: FXN; (+) strand; PAM type: YTN; PAM sequence: CTT
  source 1..20: mol_type = other DNA
cacagtcagaagatgacaag

SEQ ID NO: 35879 - DNA, 20 bp, synthetic construct
  misc_feature 1..20: note = Description of Artificial Sequence: Synthetic oligonucleotide
  misc_feature 1..20: note = Target: FXN; (+) strand; PAM type: YTN; PAM sequence: TTC
  source 1..20: mol_type = other DNA
acagtcagaagatgacaagc

SEQ ID NO: 35880 - DNA, 20 bp, synthetic construct
  misc_feature 1..20: note = Description of Artificial Sequence: Synthetic oligonucleotide
  misc_feature 1..20: note = Target: FXN; (+) strand; PAM type: YTN; PAM sequence: CTG
  source 1..20: mol_type = other DNA
agaaggggagaatcggccca

SEQ ID NO: 35881 - DNA, 20 bp, synthetic construct
  misc_feature 1..20: note = Description of Artificial Sequence: Synthetic oligonucleotide
  misc_feature 1..20: note = Target: FXN; (+) strand; PAM type: YTN; PAM sequence: CTC
  source 1..20: mol_type = other DNA
aggctggtggtggtcttacg

SEQ ID NO: 35882 - DNA, 20 bp, synthetic construct
  misc_feature 1..20: note = Description of Artificial Sequence: Synthetic oligonucleotide
  misc_feature 1..20: note = Target: FXN; (+) strand; PAM type: YTN; PAM sequence: CTG
  source 1..20: mol_type = other DNA
gtggtggtcttacgttgacc

SEQ ID NO: 35883 - DNA, 20 bp, synthetic construct
  misc_feature 1..20: note = Description of Artificial Sequence: Synthetic oligonucleotide
  misc_feature 1..20: note = Target: FXN; (+) strand; PAM type: YTN; PAM sequence: CTT
  source 1..20: mol_type = other DNA
acgttgaccatgccagaggc

SEQ ID NO: 35884 - DNA, 20 bp, synthetic construct
  misc_feature 1..20: note = Description of Artificial Sequence: Synthetic oligonucleotide
  misc_feature 1..20: note = Target: FXN; (+) strand; PAM type: YTN; PAM sequence: TTA
  source 1..20: mol_type = other DNA
cgttgaccatgccagaggcc

SEQ ID NO: 35885 - DNA, 20 bp, synthetic construct
  misc_feature 1..20: note = Description of Artificial Sequence: Synthetic oligonucleotide
  misc_feature 1..20: note = Target: FXN; (+) strand; PAM type: YTN; PAM sequence: TTG
  source 1..20: mol_type = other DNA
accatgccagaggccagtcc

SEQ ID NO: 35886 - DNA, 20 bp, synthetic construct
  misc_feature 1..20: note = Description of Artificial Sequence: Synthetic oligonucleotide
  misc_feature 1..20: note = Target: FXN; (+) strand; PAM type: YTN; PAM sequence: CTT
  source 1..20: mol_type = other DNA
gattgctccaaaccctctgt

SEQ ID NO: 35887 - DNA, 20 bp, synthetic construct
  misc_feature 1..20: note = Description of Artificial Sequence: Synthetic oligonucleotide
  misc_feature 1..20: note = Target: FXN; (+) strand; PAM type: YTN; PAM sequence: TTG
  source 1..20: mol_type = other DNA
attgctccaaaccctctgtt

SEQ ID NO: 35888 - DNA, 20 bp, synthetic construct
  misc_feature 1..20: note = Description of Artificial Sequence: Synthetic oligonucleotide
  misc_feature 1..20: note = Target: FXN; (+) strand; PAM type: YTN; PAM sequence: TTG
  source 1..20: mol_type = other DNA
ctccaaaccctctgttcgag

SEQ ID NO: 35889 - DNA, 20 bp, synthetic construct
  misc_feature 1..20: note = Description of Artificial Sequence: Synthetic oligonucleotide
  misc_feature 1..20: note = Target: FXN; (+) strand; PAM type: YTN; PAM sequence: CTC
  source 1..20: mol_type = other DNA
caaaccctctgttcgagggt

SEQ ID NO: 35890 - DNA, 20 bp, synthetic construct
  misc_feature 1..20: note = Description of Artificial Sequence: Synthetic oligonucleotide
  misc_feature 1..20: note = Target: FXN; (+) strand; PAM type: YTN; PAM sequence: CTC
  source 1..20: mol_type = other DNA
tgttcgagggttccaaatga

SEQ ID NO: 35891 - DNA, 20 bp, synthetic construct
  misc_feature 1..20: note = Description of Artificial Sequence: Synthetic oligonucleotide
  misc_feature 1..20: note = Target: FXN; (+) strand; PAM type: YTN; PAM sequence: CTG
  source 1..20: mol_type = other DNA
ttcgagggttccaaatgaaa

SEQ ID NO: 35892 - DNA, 20 bp, synthetic construct
  misc_feature 1..20: note = Description of Artificial Sequence: Synthetic oligonucleotide
  misc_feature 1..20: note = Target: FXN; (+) strand; PAM type: YTN; PAM sequence: TTC
  source 1..20: mol_type = other DNA
gagggttccaaatgaaatga

SEQ ID NO: 35893 - DNA, 20 bp, synthetic construct
  misc_feature 1..20: note = Description of Artificial Sequence: Synthetic oligonucleotide
  misc_feature 1..20: note = Target: FXN; (+) strand; PAM type: YTN; PAM sequence: TTC
  source 1..20: mol_type = other DNA
caaatgaaatgagcaggtcc

SEQ ID NO: 35894 - DNA, 20 bp, synthetic construct
  misc_feature 1..20: note = Description of Artificial Sequence: Synthetic oligonucleotide
  misc_feature 1..20: note = Target: FXN; (+) strand; PAM type: YTN; PAM sequence: CTC
  source 1..20: mol_type = other DNA
gtgtcaggacctaggttagt

SEQ ID NO: 35895 - DNA, 20 bp, synthetic construct
  misc_feature 1..20: note = Description of Artificial Sequence: Synthetic oligonucleotide
  misc_feature 1..20: note = Target: FXN; (+) strand; PAM type: YTN; PAM sequence: CTA
  source 1..20: mol_type = other DNA
ggttagtttctgaaaaagca

SEQ ID NO: 35896 - DNA, 20 bp, synthetic construct
  misc_feature 1..20: note = Description of Artificial Sequence: Synthetic oligonucleotide
  misc_feature 1..20: note = Target: FXN; (+) strand; PAM type: YTN; PAM sequence: TTA
  source 1..20: mol_type = other DNA
gtttctgaaaaagcatgaaa

SEQ ID NO: 35897 - DNA, 20 bp, synthetic construct
  misc_feature 1..20: note = Description of Artificial Sequence: Synthetic oligonucleotide
  misc_feature 1..20: note = Target: FXN; (+) strand; PAM type: YTN; PAM sequence: TTT
  source 1..20: mol_type = other DNA
ctgaaaaagcatgaaaagca

SEQ ID NO: 35898 - DNA, 20 bp, synthetic construct
  misc_feature 1..20: note = Description of Artificial Sequence: Synthetic oligonucleotide
  misc_feature 1..20: note = Target: FXN; (+) strand; PAM type: YTN; PAM sequence: TTC
  source 1..20: mol_type = other DNA
tgaaaaagcatgaaaagcag

SEQ ID NO: 35899 - DNA, 20 bp, synthetic construct
  misc_feature 1..20: note = Description of Artificial Sequence: Synthetic oligonucleotide
  misc_feature 1..20: note = Target: FXN; (+) strand; PAM type: YTN; PAM sequence: CTG
  source 1..20: mol_type = other DNA
aaaaagcatgaaaagcaggc

SEQ ID NO: 35900 - DNA, 20 bp, synthetic construct
  misc_feature 1..20: note = Description of Artificial Sequence: Synthetic oligonucleotide
  misc_feature 1..20: note = Target: FXN; (+) strand; PAM type: YTN; PAM sequence: CTC
  source 1..20: mol_type = other DNA
ctgaacttccccgagtgact

SEQ ID NO: 35901 - DNA, 20 bp, synthetic construct
  misc_feature 1..20: note = Description of Artificial Sequence: Synthetic oligonucleotide
  misc_feature 1..20: note = Target: FXN; (+) strand; PAM type: YTN; PAM sequence: CTG
  source 1..20: mol_type = other DNA
aacttccccgagtgactgat

SEQ ID NO: 35902 - DNA, 20 bp, synthetic construct
  misc_feature 1..20: note = Description of Artificial Sequence: Synthetic oligonucleotide
  misc_feature 1..20: note = Target: FXN; (+) strand; PAM type: YTN; PAM sequence: CTT
  source 1..20: mol_type = other DNA
ccccgagtgactgatgcaaa

SEQ ID NO: 35903 - DNA, 20 bp, synthetic construct
  misc_feature 1..20: note = Description of Artificial Sequence: Synthetic oligonucleotide
  misc_feature 1..20: note = Target: FXN; (+) strand; PAM type: YTN; PAM sequence: TTC
  source 1..20: mol_type = other DNA
cccgagtgactgatgcaaag

SEQ ID NO: 35904 - DNA, 20 bp, synthetic construct
  misc_feature 1..20: note = Description of Artificial Sequence: Synthetic oligonucleotide
  misc_feature 1..20: note = Target: FXN; (+) strand; PAM type: YTN; PAM sequence: CTG
  source 1..20: mol_type = other DNA
atgcaaagtgcgtcctgcat

SEQ ID NO: 35905 - DNA, 20 bp, synthetic construct
  misc_feature 1..20: note = Description of Artificial Sequence: Synthetic oligonucleotide
  misc_feature 1..20: note = Target: FXN; (+) strand; PAM type: YTN; PAM sequence: CTG
  source 1..20: mol_type = other DNA
catgcttcacagcaccatgg

SEQ ID NO: 35906 - DNA, 20 bp, synthetic construct
  misc_feature 1..20: note = Description of Artificial Sequence: Synthetic oligonucleotide
  misc_feature 1..20: note = Target: FXN; (+) strand; PAM type: YTN; PAM sequence: CTT
  source 1..20: mol_type = other DNA
cacagcaccatggagaggat

SEQ ID NO: 35907 - DNA, 20 bp, synthetic construct
  misc_feature 1..20: note = Description of Artificial Sequence: Synthetic oligonucleotide
  misc_feature 1..20: note = Target: FXN; (+) strand; PAM type: YTN; PAM sequence: TTC
  source 1..20: mol_type = other DNA
acagcaccatggagaggatc

SEQ ID NO: 35908 - DNA, 20 bp, synthetic construct
  misc_feature 1..20: note = Description of Artificial Sequence: Synthetic oligonucleotide
  misc_feature 1..20: note = Target: FXN; (+) strand; PAM type: YTN; PAM sequence: CTT
  source 1..20: mol_type = other DNA
caggggcaaactgcagacta

SEQ ID NO: 35909 - DNA, 20 bp, synthetic construct
  misc_feature 1..20: note = Description of Artificial Sequence: Synthetic oligonucleotide
  misc_feature 1..20: note = Target: FXN; (+) strand; PAM type: YTN; PAM sequence: TTC
  source 1..20: mol_type = other DNA
aggggcaaactgcagactat

SEQ ID NO: 35910 - DNA, 20 bp, synthetic construct
  misc_feature 1..20: note = Description of Artificial Sequence: Synthetic oligonucleotide
  misc_feature 1..20: note = Target: FXN; (+) strand; PAM type: YTN; PAM sequence: CTG
  source 1..20: mol_type = other DNA
cagactatctgaatgacggc

SEQ ID NO: 35911 - DNA, 20 bp, synthetic construct
  misc_feature 1..20: note = Description of Artificial Sequence: Synthetic oligonucleotide
  misc_feature 1..20: note = Target: FXN; (+) strand; PAM type: YTN; PAM sequence: CTA
  source 1..20: mol_type = other DNA
tctgaatgacggcactgacc

SEQ ID NO: 35912 - DNA, 20 bp, synthetic construct
  misc_feature 1..20: note = Description of Artificial Sequence: Synthetic oligonucleotide
  misc_feature 1..20: note = Target: FXN; (+) strand; PAM type: YTN; PAM sequence: CTG
  source 1..20: mol_type = other DNA
aatgacggcactgaccatca

SEQ ID NO: 35913 - DNA, 20 bp, synthetic construct
  misc_feature 1..20: note = Description of Artificial Sequence: Synthetic oligonucleotide
  misc_feature 1..20: note = Target: FXN; (+) strand; PAM type: YTN; PAM sequence: CTG
  source 1..20: mol_type = other DNA
accatcagcaaaccgcagag

SEQ ID NO: 35914 - DNA, 20 bp, synthetic construct
  misc_feature 1..20: note = Description of Artificial Sequence: Synthetic oligonucleotide
  misc_feature 1..20: note = Target: FXN; (+) strand; PAM type: YTN; PAM sequence: CTG
  source 1..20: mol_type = other DNA
cctgaccaagaaattgcgag

SEQ ID NO: 35915 - DNA, 20 bp, synthetic construct
  misc_feature 1..20: note = Description of Artificial Sequence: Synthetic oligonucleotide
  misc_feature 1..20: note = Target: FXN; (+) strand; PAM type: YTN; PAM sequence: CTG
  source 1..20: mol_type = other DNA
accaagaaattgcgagacag

SEQ ID NO: 35916 - DNA, 20 bp, synthetic construct
  misc_feature 1..20: note = Description of Artificial Sequence: Synthetic oligonucleotide
  misc_feature 1..20: note = Target: FXN; (+) strand; PAM type: YTN; PAM sequence: TTG
  source 1..20: mol_type = other DNA
cgagacagaagcaatgcttg

SEQ ID NO: 35917 - DNA, 20 bp, synthetic construct
  misc_feature 1..20: note = Description of Artificial Sequence: Synthetic oligonucleotide
  misc_feature 1..20: note = Target: FXN; (+) strand; PAM type: YTN; PAM sequence: CTT
  source 1..20: mol_type = other DNA
gcaggcgaagaagaaggggc

SEQ ID NO: 35918 - DNA, 20 bp, synthetic construct
  misc_feature 1..20: note = Description of Artificial Sequence: Synthetic oligonucleotide
  misc_feature 1..20: note = Target: FXN; (+) strand; PAM type: YTN; PAM sequence: TTG
  source 1..20: mol_type = other DNA
caggcgaagaagaaggggcc

SEQ ID NO: 35919 - DNA, 20 bp, synthetic construct
  misc_feature 1..20: note = Description of Artificial Sequence: Synthetic oligonucleotide
  misc_feature 1..20: note = Target: FXN; (+) strand; PAM type: YTN; PAM sequence: CTC
  source 1..20: mol_type = other DNA
acgcctgtaatcccagcact

SEQ ID NO: 35920 - DNA, 20 bp, synthetic construct
  misc_feature 1..20: note = Description of Artificial Sequence: Synthetic oligonucleotide
  misc_feature 1..20: note = Target: FXN; (+) strand; PAM type: YTN; PAM sequence: CTG
  source 1..20: mol_type = other DNA
taatcccagcactttgggag

SEQ ID NO: 35921 - DNA, 20 bp, synthetic construct
  misc_feature 1..20: note = Description of Artificial Sequence: Synthetic oligonucleotide
  misc_feature 1..20: note = Target: FXN; (+) strand; PAM type: YTN; PAM sequence: CTT
  source 1..20: mol_type = other DNA
tgggaggccaaggcaggcgg

SEQ ID NO: 35922 - DNA, 20 bp, synthetic construct
  misc_feature 1..20: note = Description of Artificial Sequence: Synthetic oligonucleotide
  misc_feature 1..20: note = Target: FXN; (+) strand; PAM type: YTN; PAM sequence: TTT
  source 1..20: mol_type = other DNA
gggaggccaaggcaggcgga

SEQ ID NO: 35923 - DNA, 20 bp, synthetic construct
  misc_feature 1..20: note = Description of Artificial Sequence: Synthetic oligonucleotide
  misc_feature 1..20: note = Target: FXN; (+) strand; PAM type: YTN; PAM sequence: TTG
  source 1..20: mol_type = other DNA
ggaggccaaggcaggcggat

SEQ ID NO: 35924 - DNA, 20 bp, synthetic construct
  misc_feature 1..20: note = Description of Artificial Sequence: Synthetic oligonucleotide
  misc_feature 1..20: note = Target: FXN; (+) strand; PAM type: YTN; PAM sequence: CTT
  source 1..20: mol_type = other DNA
gaggtcaggagtttgagacc

SEQ ID NO: 35925 - DNA, 20 bp, synthetic construct
  misc_feature 1..20: note = Description of Artificial Sequence: Synthetic oligonucleotide
  misc_feature 1..20: note = Target: FXN; (+) strand; PAM type: YTN; PAM sequence: TTG
  source 1..20: mol_type = other DNA
aggtcaggagtttgagacca

SEQ ID NO: 35926 - DNA, 20 bp, synthetic construct
  misc_feature 1..20: note = Description of Artificial Sequence: Synthetic oligonucleotide
  misc_feature 1..20: note = Target: FXN; (+) strand; PAM type: YTN; PAM sequence: TTT
  source 1..20: mol_type = other DNA
gagaccagcctgggcaacat

SEQ ID NO: 35927 - DNA, 20 bp, synthetic construct
  misc_feature 1..20: note = Description of Artificial Sequence: Synthetic oligonucleotide
  misc_feature 1..20: note = Target: FXN; (+) strand; PAM type: YTN; PAM sequence: TTG
  source 1..20: mol_type = other DNA
agaccagcctgggcaacata

SEQ ID NO: 35928 - DNA, 20 bp, synthetic construct
  misc_feature 1..20: note = Description of Artificial Sequence: Synthetic oligonucleotide
  misc_feature 1..20: note = Target: FXN; (+) strand; PAM type: YTN; PAM sequence: CTG
  source 1..20: mol_type = other DNA
ggcaacatagtgaaaccctg

SEQ ID NO: 35929 - DNA, 20 bp, synthetic construct
  misc_feature 1..20: note = Description of Artificial Sequence: Synthetic oligonucleotide
  misc_feature 1..20: note = Target: FXN; (+) strand; PAM type: YTN; PAM sequence: CTG
  source 1..20: mol_type = other DNA
tctctactaaaaatacaaaa

SEQ ID NO: 35930 - DNA, 20 bp, synthetic construct
  misc_feature 1..20: note = Description of Artificial Sequence: Synthetic oligonucleotide
  misc_feature 1..20: note = Target: FXN; (+) strand; PAM type: YTN; PAM sequence: CTC
  source 1..20: mol_type = other DNA
tactaaaaatacaaaaaatt

SEQ ID NO: 35931 - DNA, 20 bp, synthetic construct
  misc_feature 1..20: note = Description of Artificial Sequence: Synthetic oligonucleotide
  misc_feature 1..20: note = Target: FXN; (+) strand; PAM type: YTN; PAM sequence: CTA
  source 1..20: mol_type = other DNA
ctaaaaatacaaaaaattcg

SEQ ID NO: 35932 - DNA, 20 bp, synthetic construct
  misc_feature 1..20: note = Description of Artificial Sequence: Synthetic oligonucleotide
  misc_feature 1..20: note = Target: FXN; (+) strand; PAM type: YTN; PAM sequence: CTA
  source 1..20: mol_type = other DNA
aaaatacaaaaaattcgcca

SEQ ID NO: 35933 - DNA, 20 bp, synthetic construct
  misc_feature 1..20: note = Description of Artificial Sequence: Synthetic oligonucleotide
  misc_feature 1..20: note = Target: FXN; (+) strand; PAM type: YTN; PAM sequence: TTC
  source 1..20: mol_type = other DNA
gccaggcatggtggcaggca

SEQ ID NO: 35934 - DNA, 20 bp, synthetic construct
  misc_feature 1..20: note = Description of Artificial Sequence: Synthetic oligonucleotide
  misc_feature 1..20: note = Target: FXN; (+) strand; PAM type: YTN; PAM sequence: CTG
  source 1..20: mol_type = other DNA
taatcccagctgcttgggag

SEQ ID NO: 35935 - DNA, 20 bp, synthetic construct
  misc_feature 1..20: note = Description of Artificial Sequence: Synthetic oligonucleotide
  misc_feature 1..20: note = Target: FXN; (+) strand; PAM type: YTN; PAM sequence: CTG
  source 1..20: mol_type = other DNA
cttgggagactgagacagga

SEQ ID NO: 35936 - DNA, 20 bp, synthetic construct
  misc_feature 1..20: note = Description of Artificial Sequence: Synthetic oligonucleotide
  misc_feature 1..20: note = Target: FXN; (+) strand; PAM type: YTN; PAM sequence: CTT
  source 1..20: mol_type = other DNA
gggagactgagacaggagaa

SEQ ID NO: 35937 - DNA, 20 bp, synthetic construct
  misc_feature 1..20: note = Description of Artificial Sequence: Synthetic oligonucleotide
  misc_feature 1..20: note = Target: FXN; (+) strand; PAM type: YTN; PAM sequence: TTG
  source 1..20: mol_type = other DNA
ggagactgagacaggagaat

SEQ ID NO: 35938 - DNA, 20 bp, synthetic construct
  misc_feature 1..20: note = Description of Artificial Sequence: Synthetic oligonucleotide
  misc_feature 1..20: note = Target: FXN; (+) strand; PAM type: YTN; PAM sequence: CTG
  source 1..20: mol_type = other DNA
agacaggagaattgcttgaa

SEQ ID NO: 35939 - DNA, 20 bp, synthetic construct
  misc_feature 1..20: note = Description of Artificial Sequence: Synthetic oligonucleotide
  misc_feature 1..20: note = Target: FXN; (+) strand; PAM type: YTN; PAM sequence: TTG
  source 1..20: mol_type = other DNA
cttgaacccaggaggcgaag

SEQ ID NO: 35940 - DNA, 20 bp, synthetic construct
  misc_feature 1..20: note = Description of Artificial Sequence: Synthetic oligonucleotide
  misc_feature 1..20: note = Target: FXN; (+) strand; PAM type: YTN; PAM sequence: CTT
  source 1..20: mol_type = other DNA
gaacccaggaggcgaaggtt

SEQ ID NO: 35941 - DNA, 20 bp, synthetic construct
  misc_feature 1..20: note = Description of Artificial Sequence: Synthetic oligonucleotide
  misc_feature 1..20: note = Target: FXN; (+) strand; PAM type: YTN; PAM sequence: TTG
  source 1..20: mol_type = other DNA
aacccaggaggcgaaggttg

SEQ ID NO: 35942 - DNA, 20 bp, synthetic construct
  misc_feature 1..20: note = Description of Artificial Sequence: Synthetic oligonucleotide
  misc_feature 1..20: note = Target: FXN; (+) strand; PAM type: YTN; PAM sequence: TTG
  source 1..20: mol_type = other DNA
taacgaactgaaatcgtgcc

SEQ ID NO: 35943 - DNA, 20 bp, synthetic construct
  misc_feature 1..20: note = Description of Artificial Sequence: Synthetic oligonucleotide
  misc_feature 1..20: note = Target: FXN; (+) strand; PAM type: YTN; PAM sequence: CTG
  source 1..20: mol_type = other DNA
aaatcgtgccacagcactcc

SEQ ID NO: 35944 - DNA, 20 bp, synthetic construct
  misc_feature 1..20: note = Description of Artificial Sequence: Synthetic oligonucleotide
  misc_feature 1..20: note = Target: FXN; (+) strand; PAM type: YTN; PAM sequence: CTC
  source 1..20: mol_type = other DNA
catcctgggcgacagagtga

SEQ ID NO: 35945 - DNA, 20 bp, synthetic construct
  misc_feature 1..20: note = Description of Artificial Sequence: Synthetic oligonucleotide
  misc_feature 1..20: note = Target: FXN; (+) strand; PAM type: YTN; PAM sequence: CTG
  source 1..20: mol_type = other DNA
ggcgacagagtgagactgtc

SEQ ID NO: 35946 - DNA, 20 bp, synthetic construct
  misc_feature 1..20: note = Description of Artificial Sequence: Synthetic oligonucleotide
  misc_feature 1..20: note = Target: FXN; (+) strand; PAM type: YTN; PAM sequence: CTG
  source 1..20: mol_type = other DNA
tctcaaaaaaaggaggagaa

SEQ ID NO: 35947 - DNA, 20 bp, synthetic construct
  misc_feature 1..20: note = Description of Artificial Sequence: Synthetic oligonucleotide
  misc_feature 1..20: note = Target: FXN; (+) strand; PAM type: YTN; PAM sequence: CTC
  source 1..20: mol_type = other DNA
aaaaaaaggaggagaagaag

SEQ ID NO: 35948 - DNA, 20 bp, synthetic construct
  misc_feature 1..20: note = Description of Artificial Sequence: Synthetic oligonucleotide
  misc_feature 1..20: note = Target: FXN; (+) strand; PAM type: YTN; PAM sequence: TTG
  source 1..20: mol_type = other DNA
gagtgaagcaactggcctcc

SEQ ID NO: 35949 - DNA, 20 bp, synthetic construct
  misc_feature 1..20: note = Description of Artificial Sequence: Synthetic oligonucleotide
  misc_feature 1..20: note = Target: FXN; (+) strand; PAM type: YTN; PAM sequence: CTG
  source 1..20: mol_type = other DNA
gcctcctcgtgctaagcggc

SEQ ID NO: 35950 - DNA, 20 bp, synthetic construct
  misc_feature 1..20: note = Description of Artificial Sequence: Synthetic oligonucleotide
  misc_feature 1..20: note = Target: FXN; (+) strand; PAM type: YTN; PAM sequence: CTC
  source 1..20: mol_type = other DNA
ctcgtgctaagcggctactg

SEQ ID NO: 35951 - DNA, 20 bp, synthetic construct
  misc_feature 1..20: note = Description of Artificial Sequence: Synthetic oligonucleotide
  misc_feature 1..20: note = Target: FXN; (+) strand; PAM type: YTN; PAM sequence: CTC
  source 1..20: mol_type = other DNA
gtgctaagcggctactgtga

SEQ ID NO: 35952 - DNA, 20 bp, synthetic construct
  misc_feature 1..20: note = Description of Artificial Sequence: Synthetic oligonucleotide
  misc_feature 1..20: note = Target: FXN; (+) strand; PAM type: YTN; PAM sequence: CTA
  source 1..20: mol_type = other DNA
agcggctactgtgagttctt

SEQ ID NO: 35953 - DNA, 20 bp, synthetic construct
  misc_feature 1..20: note = Description of Artificial Sequence: Synthetic oligonucleotide
  misc_feature 1..20: note = Target: FXN; (+) strand; PAM type: YTN; PAM sequence: CTA
  source 1..20: mol_type = other DNA
ctgtgagttctttccactcc

SEQ ID NO: 35954 - DNA, 20 bp, synthetic construct
  misc_feature 1..20: note = Description of Artificial Sequence: Synthetic oligonucleotide
  misc_feature 1..20: note = Target: FXN; (+) strand; PAM type: YTN; PAM sequence: CTG
  source 1..20: mol_type = other DNA
tgagttctttccactccccc

SEQ ID NO: 35955 - DNA, 20 bp, synthetic construct
  misc_feature 1..20: note = Description of Artificial Sequence: Synthetic oligonucleotide
  misc_feature 1..20: note = Target: FXN; (+) strand; PAM type: YTN; PAM sequence: TTC
  source 1..20: mol_type = other DNA
tttccactcccccaagacat

SEQ ID NO: 35956 - DNA, 20 bp, synthetic construct
  misc_feature 1..20: note = Description of Artificial Sequence: Synthetic oligonucleotide
  misc_feature 1..20: note = Target: FXN; (+) strand; PAM type: YTN; PAM sequence: CTT
  source 1..20: mol_type = other DNA
tccactcccccaagacattg

SEQ ID NO: 35957 - DNA, 20 bp, synthetic construct
  misc_feature 1..20: note = Description of Artificial Sequence: Synthetic oligonucleotide
  misc_feature 1..20: note = Target: FXN; (+) strand; PAM type: YTN; PAM sequence: TTT
  source 1..20: mol_type = other DNA
ccactcccccaagacattgc

SEQ ID NO: 35958 - DNA, 20 bp, synthetic construct
  misc_feature 1..20: note = Description of Artificial Sequence: Synthetic oligonucleotide
  misc_feature 1..20: note = Target: FXN; (+) strand; PAM type: YTN; PAM sequence: TTC
  source 1..20: mol_type = other DNA
cactcccccaagacattgca

SEQ ID NO: 35959 - DNA, 20 bp, synthetic construct
  misc_feature 1..20: note = Description of Artificial Sequence: Synthetic oligonucleotide
  misc_feature 1..20: note = Target: FXN; (+) strand; PAM type: YTN; PAM sequence: CTC
  source 1..20: mol_type = other DNA
ccccaagacattgcataaat

SEQ ID NO: 35960 - DNA, 20 bp, synthetic construct
  misc_feature 1..20: note = Description of Artificial Sequence: Synthetic oligonucleotide
  misc_feature 1..20: note = Target: FXN; (+) strand; PAM type: YTN; PAM sequence: TTG
  source 1..20: mol_type = other DNA
cataaataatgtcactttct

SEQ ID NO: 35961 - DNA, 20 bp, synthetic construct
  misc_feature 1..20: note = Description of Artificial Sequence: Synthetic oligonucleotide
  misc_feature 1..20: note = Target: FXN; (+) strand; PAM type: YTN; PAM sequence: CTT
  source 1..20: mol_type = other DNA
tctgacactcaccccgctga

SEQ ID NO: 35962 - DNA, 20 bp, synthetic construct
  misc_feature 1..20: note = Description of Artificial Sequence: Synthetic oligonucleotide
  misc_feature 1..20: note = Target: FXN; (+) strand; PAM type: YTN; PAM sequence: TTT
  source 1..20: mol_type = other DNA
ctgacactcaccccgctgaa

SEQ ID NO: 35963 - DNA, 20 bp, synthetic construct
  misc_feature 1..20: note = Description of Artificial Sequence: Synthetic oligonucleotide
  misc_feature 1..20: note = Target: FXN; (+) strand; PAM type: YTN; PAM sequence: TTC
  source 1..20: mol_type = other DNA
tgacactcaccccgctgaat

SEQ ID NO: 35964 - DNA, 20 bp, synthetic construct
  misc_feature 1..20: note = Description of Artificial Sequence: Synthetic oligonucleotide
  misc_feature 1..20: note = Target: FXN; (+) strand; PAM type: YTN; PAM sequence: CTG
  source 1..20: mol_type = other DNA
acactcaccccgctgaatgt

SEQ ID NO: 35965 - DNA, 20 bp, synthetic construct
  misc_feature 1..20: note = Description of Artificial Sequence: Synthetic oligonucleotide
  misc_feature 1..20: note = Target: FXN; (+) strand; PAM type: YTN; PAM sequence: CTC
  source 1..20: mol_type = other DNA
accccgctgaatgtcctgcc

SEQ ID NO: 35966 - DNA, 20 bp, synthetic construct
  misc_feature 1..20: note = Description of Artificial Sequence: Synthetic oligonucleotide
  misc_feature 1..20: note = Target: FXN; (+) strand; PAM type: YTN; PAM sequence: CTG
  source 1..20: mol_type = other DNA
aatgtcctgcctctgctcaa

SEQ ID NO: 35967 - DNA, 20 bp, synthetic construct
  misc_feature 1..20: note = Description of Artificial Sequence: Synthetic oligonucleotide
  misc_feature 1..20: note = Target: FXN; (+) strand; PAM type: YTN; PAM sequence: CTG
  source 1..20: mol_type = other DNA
cctctgctcaagggtggtat

SEQ ID NO: 35968 - DNA, 20 bp, synthetic construct
  misc_feature 1..20: note = Description of Artificial Sequence: Synthetic oligonucleotide
  misc_feature 1..20: note = Target: FXN; (+) strand; PAM type: YTN; PAM sequence: CTC
  source 1..20: mol_type = other DNA
tgctcaagggtggtatgatg

SEQ ID NO: 35969 - DNA, 20 bp, synthetic construct
  misc_feature 1..20: note = Description of Artificial Sequence: Synthetic oligonucleotide
  misc_feature 1..20: note = Target: FXN; (+) strand; PAM type: YTN; PAM sequence: CTG
  source 1..20: mol_type = other DNA
ctcaagggtggtatgatggg

SEQ ID NO: 35970 - DNA, 20 bp, synthetic construct
  misc_feature 1..20: note = Description of Artificial Sequence: Synthetic oligonucleotide
  misc_feature 1..20: note = Target: FXN; (+) strand; PAM type: YTN; PAM sequence: CTC
  source 1..20: mol_type = other DNA
aagggtggtatgatggggac

SEQ ID NO: 35971 - DNA, 20 bp, synthetic construct
  misc_feature 1..20: note = Description of Artificial Sequence: Synthetic oligonucleotide
  misc_feature 1..20: note = Target: FXN; (+) strand; PAM type: YTN; PAM sequence: CTT
  source 1..20: mol_type = other DNA
ggcagtggaggggaacaggg

SEQ ID NO: 35972 - DNA, 20 bp, synthetic construct
  misc_feature 1..20: note = Description of Artificial Sequence: Synthetic oligonucleotide
  misc_feature 1..20: note = Target: FXN; (+) strand; PAM type: YTN; PAM sequence: TTG
  source 1..20: mol_type = other DNA
gcagtggaggggaacaggga

SEQ ID NO: 35973 - DNA, 20 bp, synthetic construct
  misc_feature 1..20: note = Description of Artificial Sequence: Synthetic oligonucleotide
  misc_feature 1..20: note = Target: FXN; (+) strand; PAM type: YTN; PAM sequence: CTC
  source 1..20: mol_type = other DNA
cccgcttcctggctacaagt

SEQ ID NO: 35974 - DNA, 20 bp, synthetic construct
  misc_feature 1..20: note = Description of Artificial Sequence: Synthetic oligonucleotide
  misc_feature 1..20: note = Target: FXN; (+) strand; PAM type: YTN; PAM sequence: CTT
  source 1..20: mol_type = other DNA
cctggctacaagtccctctg

SEQ ID NO: 35975 - DNA, 20 bp, synthetic construct
  misc_feature 1..20: note = Description of Artificial Sequence: Synthetic oligonucleotide
  misc_feature 1..20: note = Target: FXN; (+) strand; PAM type: YTN; PAM sequence: TTC
  source 1..20: mol_type = other DNA
ctggctacaagtccctctga

SEQ ID NO: 35976 - DNA, 20 bp, synthetic construct
  misc_feature 1..20: note = Description of Artificial Sequence: Synthetic oligonucleotide
  misc_feature 1..20: note = Target: FXN; (+) strand; PAM type: YTN; PAM sequence: CTG
  source 1..20: mol_type = other DNA
gctacaagtccctctgaaga

SEQ ID NO: 35977 - DNA, 20 bp, synthetic construct
  misc_feature 1..20: note = Description of Artificial Sequence: Synthetic oligonucleotide
  misc_feature 1..20: note = Target: FXN; (+) strand; PAM type: YTN; PAM sequence: CTA
  source 1..20: mol_type = other DNA
caagtccctctgaagaaatc

SEQ ID NO: 35978 - DNA, 20 bp, synthetic construct
  misc_feature 1..20: note = Description of Artificial Sequence: Synthetic oligonucleotide
  misc_feature 1..20: note = Target: FXN; (+) strand; PAM type: YTN; PAM sequence: CTC
  source 1..20: mol_type = other DNA
tgaagaaatccaaaggagta

SEQ ID NO: 35979 - DNA, 20 bp, synthetic construct
  misc_feature 1..20: note = Description of Artificial Sequence: Synthetic oligonucleotide
  misc_feature 1..20: note = Target: FXN; (+) strand; PAM type: YTN; PAM sequence: CTG
  source 1..20: mol_type = other DNA
aagaaatccaaaggagtaaa

SEQ ID NO: 35980 - DNA, 20 bp, synthetic construct
  misc_feature 1..20: note = Description of Artificial Sequence: Synthetic oligonucleotide
  misc_feature 1..20: note = Target: FXN; (+) strand; PAM type: YTN; PAM sequence: CTT
  source 1..20: mol_type = other DNA
ggagagtaggcctctgtagg

SEQ ID NO: 35981 - DNA, 20 bp, synthetic construct
  misc_feature 1..20: note = Description of Artificial Sequence: Synthetic oligonucleotide
  misc_feature 1..20: note = Target: FXN; (+) strand; PAM type: YTN; PAM sequence: TTG
  source 1..20: mol_type = other DNA
gagagtaggcctctgtaggg

SEQ ID NO: 35982 - DNA, 20 bp, synthetic construct
  misc_feature 1..20: note = Description of Artificial Sequence: Synthetic oligonucleotide
  misc_feature 1..20: note = Target: FXN; (+) strand; PAM type: YTN; PAM sequence: CTC
  source 1..20: mol_type = other DNA
tgtagggtgcaagggcacag

SEQ ID NO: 35983 - DNA, 20 bp, synthetic construct
  misc_feature 1..20: note = Description of Artificial Sequence: Synthetic oligonucleotide
  misc_feature 1..20: note = Target: FXN; (+) strand; PAM type: YTN; PAM sequence: CTG
  source 1..20: mol_type = other DNA
tagggtgcaagggcacagct

SEQ ID NO: 35984 - DNA, 20 bp, synthetic construct
  misc_feature 1..20: note = Description of Artificial Sequence: Synthetic oligonucleotide
  misc_feature 1..20: note = Target: FXN; (+) strand; PAM type: YTN; PAM sequence: CTG
  source 1..20: mol_type = other DNA
gagacggagctcctgaggct

SEQ ID NO: 35985 - DNA, 20 bp, synthetic construct
  misc_feature 1..20: note = Description of Artificial Sequence: Synthetic oligonucleotide
  misc_feature 1..20: note = Target: FXN; (+) strand; PAM type: YTN; PAM sequence: CTC
  source 1..20: mol_type = other DNA
ctgaggctgcagctgatgct

SEQ ID NO: 35986 - DNA, 20 bp, synthetic construct
  misc_feature 1..20: note = Description of Artificial Sequence: Synthetic oligonucleotide
  misc_feature 1..20: note = Target: FXN; (+) strand; PAM type: YTN; PAM sequence: CTG
  source 1..20: mol_type = other DNA
aggctgcagctgatgctgcc

SEQ ID NO: 35987 - DNA, 20 bp, synthetic construct
  misc_feature 1..20: note = Description of Artificial Sequence: Synthetic oligonucleotide
  misc_feature 1..20: note = Target: FXN; (+) strand; PAM type: YTN; PAM sequence: CTG
  source 1..20: mol_type = other DNA
cagctgatgctgcccgctct

SEQ ID NO: 35988 - DNA, 20 bp, synthetic construct
  misc_feature 1..20: note = Description of Artificial Sequence: Synthetic oligonucleotide
  misc_feature 1..20: note = Target: FXN; (+) strand; PAM type: YTN; PAM sequence: CTG
  source 1..20: mol_type = other DNA
atgctgcccgctctgcctga

SEQ ID NO: 35989 - DNA, 20 bp, synthetic construct
  misc_feature 1..20: note = Description of Artificial Sequence: Synthetic oligonucleotide
  misc_feature 1..20: note = Target: FXN; (+) strand; PAM type: YTN; PAM sequence: CTG
  source 1..20: mol_type = other DNA
cccgctctgcctgaactgca

SEQ ID NO: 35990 - DNA, 20 bp, synthetic construct
  misc_feature 1..20: note = Description of Artificial Sequence: Synthetic oligonucleotide
  misc_feature 1..20: note = Target: FXN; (+) strand; PAM type: YTN; PAM sequence: CTC
  source 1..20: mol_type = other DNA
tgcctgaactgcaccaaaaa

SEQ ID NO: 35991 - DNA, 20 bp, synthetic construct
  misc_feature 1..20: note = Description of Artificial Sequence: Synthetic oligonucleotide
  misc_feature 1..20: note = Target: FXN; (+) strand; PAM type: YTN; PAM sequence: CTG
  source 1..20: mol_type = other DNA
cctgaactgcaccaaaaacg

SEQ ID NO: 35992 - DNA, 20 bp, synthetic construct
  misc_feature 1..20: note = Description of Artificial Sequence: Synthetic oligonucleotide
  misc_feature 1..20: note = Target: FXN; (+) strand; PAM type: YTN; PAM sequence: CTG
  source 1..20: mol_type = other DNA
aactgcaccaaaaacgtgat

SEQ ID NO: 35993 - DNA, 20 bp, synthetic construct
  misc_feature 1..20: note = Description of Artificial Sequence: Synthetic oligonucleotide
  misc_feature 1..20: note = Target: FXN; (+) strand; PAM type: YTN; PAM sequence: CTG
  source 1..20: mol_type = other DNA
caccaaaaacgtgatgaggc

SEQ ID NO: 35994 - DNA, 20 bp, synthetic construct
  misc_feature 1..20: note = Description of Artificial Sequence: Synthetic oligonucleotide
  misc_feature 1..20: note = Target: FXN; (+) strand; PAM type: YTN; PAM sequence: CTA
  source 1..20: mol_type = other DNA
ctgcccgacctctagcagag

SEQ ID NO: 35995 - DNA, 20 bp, synthetic construct
  misc_feature 1..20: note = Description of Artificial Sequence: Synthetic oligonucleotide
  misc_feature 1..20: note = Target: FXN; (+) strand; PAM type: YTN; PAM sequence: CTG
  source 1..20: mol_type = other DNA
cccgacctctagcagagact

SEQ ID NO: 35996 - DNA, 20 bp, synthetic construct
  misc_feature 1..20: note = Description of Artificial Sequence: Synthetic oligonucleotide
  misc_feature 1..20: note = Target: FXN; (+) strand; PAM type: YTN; PAM sequence: CTC
  source 1..20: mol_type = other DNA
tagcagagactaagcaaggt

SEQ ID NO: 35997 - DNA, 20 bp, synthetic construct
  misc_feature 1..20: note = Description of Artificial Sequence: Synthetic oligonucleotide
  misc_feature 1..20: note = Target: FXN; (+) strand; PAM type: YTN; PAM sequence: CTA
  source 1..20: mol_type = other DNA
gcagagactaagcaaggtgc

SEQ ID NO: 35998 - DNA, 20 bp, synthetic construct
  misc_feature 1..20: note = Description of Artificial Sequence: Synthetic oligonucleotide
  misc_feature 1..20: note = Target: FXN; (+) strand; PAM type: YTN; PAM sequence: CTA
  source 1..20: mol_type = other DNA
agcaaggtgcatgaaaactt

SEQ ID NO: 35999 - DNA, 20 bp, synthetic construct
  misc_feature 1..20: note = Description of Artificial Sequence: Synthetic oligonucleotide
  misc_feature 1..20: note = Target: FXN; (+) strand; PAM type: YTN; PAM sequence: CTT
  source 1..20: mol_type = other DNA
gaaccacatgtgtcacaccc

SEQ ID NO: 36000 - DNA, 20 bp, synthetic construct
  misc_feature 1..20: note = Description of Artificial Sequence: Synthetic oligonucleotide
  misc_feature 1..20: note = Target: FXN; (+) strand; PAM type: YTN; PAM sequence: TTG
  source 1..20: mol_type = other DNA
aaccacatgtgtcacaccca

SEQ ID NO: 36001 - DNA, 20 bp, synthetic construct
  misc_feature 1..20: note = Description of Artificial Sequence: Synthetic oligonucleotide
  misc_feature 1..20: note = Target: FXN; (+) strand; PAM type: YTN; PAM sequence: CTA
  source 1..20: mol_type = other DNA
catgaagatggcccaaaacc

SEQ ID NO: 36002 - DNA, 20 bp, synthetic construct
  misc_feature 1..20: note = Description of Artificial Sequence: Synthetic oligonucleotide
  misc_feature 1..20: note = Target: FXN; (+) strand; PAM type: YTN; PAM sequence: CTG
  source 1..20: mol_type = other DNA
gcccaggaattgaagaaaga

SEQ ID NO: 36003 - DNA, 20 bp, synthetic construct
  misc_feature 1..20: note = Description of Artificial Sequence: Synthetic oligonucleotide
  misc_feature 1..20: note = Target: FXN; (+) strand; PAM type: YTN; PAM sequence: TTG
  source 1..20: mol_type = other DNA
aagaaagactcttccaattt

SEQ ID NO: 36004 - DNA, 20 bp, synthetic construct
  misc_feature 1..20: note = Description of Artificial Sequence: Synthetic oligonucleotide
  misc_feature 1..20: note = Target: FXN; (+) strand; PAM type: YTN; PAM sequence: CTC
  source 1..20: mol_type = other DNA
ttccaatttgctgtaagaaa

SEQ ID NO: 36005 - DNA, 20 bp, synthetic construct
  misc_feature 1..20: note = Description of Artificial Sequence: Synthetic oligonucleotide
  misc_feature 1..20: note = Target: FXN; (+) strand; PAM type: YTN; PAM sequence: CTT
  source 1..20: mol_type = other DNA
ccaatttgctgtaagaaaat

SEQ ID NO: 36006 - DNA, 20 bp, synthetic construct
  misc_feature 1..20: note = Description of Artificial Sequence: Synthetic oligonucleotide
  misc_feature 1..20: note = Target: FXN; (+) strand; PAM type: YTN; PAM sequence: TTC
  source 1..20: mol_type = other DNA
caatttgctgtaagaaaatg

SEQ ID NO: 36007 - DNA, 20 bp, synthetic construct
  misc_feature 1..20: note = Description of Artificial Sequence: Synthetic oligonucleotide
  misc_feature 1..20: note = Target: FXN; (+) strand; PAM type: YTN; PAM sequence: TTT
  source 1..20: mol_type = other DNA
gctgtaagaaaatggcccag

SEQ ID NO: 36008 - DNA, 20 bp, synthetic construct
  misc_feature 1..20: note = Description of Artificial Sequence: Synthetic oligonucleotide
  misc_feature 1..20: note = Target: FXN; (+) strand; PAM type: YTN; PAM sequence: TTG
  source 1..20: mol_type = other DNA
ctgtaagaaaatggcccagg

SEQ ID NO: 36009 - DNA, 20 bp, synthetic construct
  misc_feature 1..20: note = Description of Artificial Sequence: Synthetic oligonucleotide
  misc_feature 1..20: note = Target: FXN; (+) strand; PAM type: YTN; PAM sequence: CTG
  source 1..20: mol_type = other DNA
taagaaaatggcccaggggg

SEQ ID NO: 36010 - DNA, 20 bp, synthetic construct
  misc_feature 1..20: note = Description of Artificial Sequence: Synthetic oligonucleotide
  misc_feature 1..20: note = Target: FXN; (+) strand; PAM type: YTN; PAM sequence: CTC
  source 1..20: mol_type = other DNA
acacctgtaatcctagcact

SEQ ID NO: 36011 - DNA, 20 bp, synthetic construct
  misc_feature 1..20: note = Description of Artificial Sequence: Synthetic oligonucleotide
  misc_feature 1..20: note = Target: FXN; (+) strand; PAM type: YTN; PAM sequence: CTG
  source 1..20: mol_type = other DNA
taatcctagcactttgggaa

SEQ ID NO: 36012 - DNA, 20 bp, synthetic construct
  misc_feature 1..20: note = Description of Artificial Sequence: Synthetic oligonucleotide
  misc_feature 1..20: note = Target: FXN; (+) strand; PAM type: YTN; PAM sequence: CTA
  source 1..20: mol_type = other DNA
gcactttgggaagctgacgc

SEQ ID NO: 36013 - DNA, 20 bp, synthetic construct
  misc_feature 1..20: note = Description of Artificial Sequence: Synthetic oligonucleotide
  misc_feature 1..20: note = Target: FXN; (+) strand; PAM type: YTN; PAM sequence: CTT
  source 1..20: mol_type = other DNA
tgggaagctgacgcaggcag

SEQ ID NO: 36014 - DNA, 20 bp, synthetic construct
  misc_feature 1..20: note = Description of Artificial Sequence: Synthetic oligonucleotide
  misc_feature 1..20: note = Target: FXN; (+) strand; PAM type: YTN; PAM sequence: TTT
  source 1..20: mol_type = other DNA
gggaagctgacgcaggcaga

SEQ ID NO: 36015 - DNA, 20 bp, synthetic construct
  misc_feature 1..20: note = Description of Artificial Sequence: Synthetic oligonucleotide
  misc_feature 1..20: note = Target: FXN; (+) strand; PAM type: YTN; PAM sequence: TTG
  source 1..20: mol_type = other DNA
ggaagctgacgcaggcagat

SEQ ID NO: 36016 - DNA, 20 bp, synthetic construct
  misc_feature 1..20: note = Description of Artificial Sequence: Synthetic oligonucleotide
  misc_feature 1..20: note = Target: FXN; (+) strand; PAM type: YTN; PAM sequence: CTG
  source 1..20: mol_type = other DNA
acgcaggcagatggcttgag

SEQ ID NO: 36017 - DNA, 20 bp, synthetic construct
  misc_feature 1..20: note = Description of Artificial Sequence: Synthetic oligonucleotide
  misc_feature 1..20: note = Target: FXN; (+) strand; PAM type: YTN; PAM sequence: CTT
  source 1..20: mol_type = other DNA
gagctcaggagttccagacc

SEQ ID NO: 36018 - DNA, 20 bp, synthetic construct
  misc_feature 1..20: note = Description of Artificial Sequence: Synthetic oligonucleotide
  misc_feature 1..20: note = Target: FXN; (+) strand; PAM type: YTN; PAM sequence: TTG
  source 1..20: mol_type = other DNA
agctcaggagttccagacca

SEQ ID NO: 36019 - DNA, 20 bp, synthetic construct
  misc_feature 1..20: note = Description of Artificial Sequence: Synthetic oligonucleotide
  misc_feature 1..20: note = Target: FXN; (+) strand; PAM type: YTN; PAM sequence: CTC
  source 1..20: mol_type = other DNA
aggagttccagaccagcctg

SEQ ID NO: 36020 - DNA, 20 bp, synthetic construct
  misc_feature 1..20: note = Description of Artificial Sequence: Synthetic oligonucleotide
  misc_feature 1..20: note = Target: FXN; (+) strand; PAM type: YTN; PAM sequence: TTC
  source 1..20: mol_type = other DNA
cagaccagcctgggcaacat

SEQ ID NO: 36021 - DNA, 20 bp, synthetic construct
  misc_feature 1..20: note = Description of Artificial Sequence: Synthetic oligonucleotide
  misc_feature 1..20: note = Target: FXN; (+) strand; PAM type: YTN; PAM sequence: CTG
  source 1..20: mol_type = other DNA
ggcaacatggtgaaaccccg

SEQ ID NO: 36022 - DNA, 20 bp, synthetic construct
  misc_feature 1..20: note = Description of Artificial Sequence: Synthetic oligonucleotide
  misc_feature 1..20: note = Target: FXN; (+) strand; PAM type: YTN; PAM sequence: CTC
  source 1..20: mol_type = other DNA
taccaaaaatacaaaaatta

SEQ ID NO: 36023 - DNA, 20 bp, synthetic construct
  misc_feature 1..20: note = Description of Artificial Sequence: Synthetic oligonucleotide
  misc_feature 1..20: note = Target: FXN; (+) strand; PAM type: YTN; PAM sequence: CTA
  source 1..20: mol_type = other DNA
ccaaaaatacaaaaattagc

SEQ ID NO: 36024 - DNA, 20 bp, synthetic construct
  misc_feature 1..20: note = Description of Artificial Sequence: Synthetic oligonucleotide
  misc_feature 1..20: note = Target: FXN; (+) strand; PAM type: YTN; PAM sequence: TTA
  source 1..20: mol_type = other DNA
gccgggtgtggtgatgcatg

SEQ ID NO: 36025 - DNA, 20 bp, synthetic construct
  misc_feature 1..20: note = Description of Artificial Sequence: Synthetic oligonucleotide
  misc_feature 1..20: note = Target: FXN; (+) strand; PAM type: YTN; PAM sequence: CTG
  source 1..20: mol_type = other DNA
tggtcccagctactcaggag

SEQ ID NO: 36026 - DNA, 20 bp, synthetic construct
  misc_feature 1..20: note = Description of Artificial Sequence: Synthetic oligonucleotide
  misc_feature 1..20: note = Target: FXN; (+) strand; PAM type: YTN; PAM sequence: CTA
  source 1..20: mol_type = other DNA
ctcaggaggctgaggtggaa

SEQ ID NO: 36027 - DNA, 20 bp, synthetic construct
  misc_feature 1..20: note = Description of Artificial Sequence: Synthetic oligonucleotide
  misc_feature 1..20: note = Target: FXN; (+) strand; PAM type: YTN; PAM sequence: CTC
  source 1..20: mol_type = other DNA
aggaggctgaggtggaagga

SEQ ID NO: 36028 - DNA, 20 bp, synthetic construct
  misc_feature 1..20: note = Description of Artificial Sequence: Synthetic oligonucleotide
  misc_feature 1..20: note = Target: FXN; (+) strand; PAM type: YTN; PAM sequence: CTG
  source 1..20: mol_type = other DNA
aggtggaaggattgcctgag

SEQ ID NO: 36029 - DNA, 20 bp, synthetic construct
  misc_feature 1..20: note = Description of Artificial Sequence: Synthetic oligonucleotide
  misc_feature 1..20: note = Target: FXN; (+) strand; PAM type: YTN; PAM sequence: TTG
  source 1..20: mol_type = other DNA
cctgagtctgtggggcagag

SEQ ID NO: 36030 - DNA, 20 bp, synthetic construct
  misc_feature 1..20: note = Description of Artificial Sequence: Synthetic oligonucleotide
  misc_feature 1..20: note = Target: FXN; (+) strand; PAM type: YTN; PAM sequence: CTG
  source 1..20: mol_type = other DNA
agtctgtggggcagaggttg

SEQ ID NO: 36031 - DNA, 20 bp, synthetic construct
  misc_feature 1..20: note = Description of Artificial Sequence: Synthetic oligonucleotide
  misc_feature 1..20: note = Target: FXN; (+) strand; PAM type: YTN; PAM sequence: CTG
  source 1..20: mol_type = other DNA
tggggcagaggttgcagtga

SEQ ID NO: 36032 - DNA, 20 bp, synthetic construct
  misc_feature 1..20: note = Description of Artificial Sequence: Synthetic oligonucleotide
  misc_feature 1..20: note = Target: FXN; (+) strand; PAM type: YTN; PAM sequence: TTG
  source 1..20: mol_type = other DNA
cagtgagctgagatcacacc

SEQ ID NO: 36033 - DNA, 20 bp, synthetic construct
  misc_feature 1..20: note = Description of Artificial Sequence: Synthetic oligonucleotide
  misc_feature 1..20: note = Target: FXN; (+) strand; PAM type: YTN; PAM sequence: CTG
  source 1..20: mol_type = other DNA
agatcacaccactgcactcc

SEQ ID NO: 36034 - DNA, 20 bp, synthetic construct
  misc_feature 1..20: note = Description of Artificial Sequence: Synthetic oligonucleotide
  misc_feature 1..20: note = Target: FXN; (+) strand; PAM type: YTN; PAM sequence: CTG
  source 1..20: mol_type = other DNA
cactccagcctgggtgacac

SEQ ID NO: 36035 - DNA, 20 bp, synthetic construct
  misc_feature 1..20: note = Description of Artificial Sequence: Synthetic oligonucleotide
  misc_feature 1..20: note = Target: FXN; (+) strand; PAM type: YTN; PAM sequence: CTC
  source 1..20: mol_type = other DNA
cagcctgggtgacacagtga

SEQ ID NO: 36036 - DNA, 20 bp, synthetic construct
  misc_feature 1..20: note = Description of Artificial Sequence: Synthetic oligonucleotide
  misc_feature 1..20: note = Target: FXN; (+) strand; PAM type: YTN; PAM sequence: CTG
  source 1..20: mol_type = other DNA
ggtgacacagtgagacccca

SEQ ID NO: 36037 - DNA, 20 bp, synthetic construct
  misc_feature 1..20: note = Description of Artificial Sequence: Synthetic oligonucleotide
  misc_feature 1..20: note = Target: FXN; (+) strand; PAM type: YTN; PAM sequence: CTC
  source 1..20: mol_type = other DNA
aaaaaaaaaaaaaagaaaga

SEQ ID NO: 36038 - DNA, 20 bp, synthetic construct
  misc_feature 1..20: note = Description of Artificial Sequence: Synthetic oligonucleotide
  misc_feature 1..20: note = Target: FXN; (+) strand; PAM type: YTN; PAM sequence: CTG
  source 1..20: mol_type = other DNA
gagggccgccgtgtccattg

SEQ ID NO: 36039 - DNA, 20 bp, synthetic construct
  misc_feature 1..20: note = Description of Artificial Sequence: Synthetic oligonucleotide
  misc_feature 1..20: note = Target: FXN; (+) strand; PAM type: YTN; PAM sequence: TTG
  source 1..20: mol_type = other DNA
agagagtgctccaggcactc

SEQ ID NO: 36040 - DNA, 20 bp, synthetic construct
  misc_feature 1..20: note = Description of Artificial Sequence: Synthetic oligonucleotide
  misc_feature 1..20: note = Target: FXN; (+) strand; PAM type: YTN; PAM sequence: CTC
  source 1..20: mol_type = other DNA
caggcactccaaaaagaaaa

SEQ ID NO: 36041 - DNA, 20 bp, synthetic construct
  misc_feature 1..20: note = Description of Artificial Sequence: Synthetic oligonucleotide
  misc_feature 1..20: note = Target: FXN; (+) strand; PAM type: YTN; PAM sequence: CTC
  source 1..20: mol_type = other DNA
caaaaagaaaatgaccacaa

SEQ ID NO: 36042 - DNA, 20 bp, synthetic construct
  misc_feature 1..20: note = Description of Artificial Sequence: Synthetic oligonucleotide
  misc_feature 1..20: note = Target: FXN; (+) strand; PAM type: YTN; PAM sequence: CTG
  source 1..20: mol_type = other DNA
accatgagaccaagttccaa

SEQ ID NO: 36043 - DNA, 20 bp, synthetic construct
  misc_feature 1..20: note = Description of Artificial Sequence: Synthetic oligonucleotide
  misc_feature 1..20: note = Target: FXN; (+) strand; PAM type: YTN; PAM sequence: TTC
  source 1..20: mol_type = other DNA
caaccttttacaagtggcct

SEQ ID NO: 36044 - DNA, 20 bp, synthetic construct
  misc_feature 1..20: note = Description of Artificial Sequence: Synthetic oligonucleotide
  misc_feature 1..20: note = Target: FXN; (+) strand; PAM type: YTN; PAM sequence: CTT
  source 1..20: mol_type = other DNA
ttacaagtggcctgtggctc

SEQ ID NO: 36045 - DNA, 20 bp, synthetic construct
  misc_feature 1..20: note = Description of Artificial Sequence: Synthetic oligonucleotide
  misc_feature 1..20: note = Target: FXN; (+) strand; PAM type: YTN; PAM sequence: TTT
  source 1..20: mol_type = other DNA
tacaagtggcctgtggctcc

SEQ ID NO: 36046 - DNA, 20 bp, synthetic construct
  misc_feature 1..20: note = Description of Artificial Sequence: Synthetic oligonucleotide
  misc_feature 1..20: note = Target: FXN; (+) strand; PAM type: YTN; PAM sequence: TTT
  source 1..20: mol_type = other DNA
acaagtggcctgtggctcct

SEQ ID NO: 36047 - DNA, 20 bp, synthetic construct
  misc_feature 1..20: note = Description of Artificial Sequence: Synthetic oligonucleotide
  misc_feature 1..20: note = Target: FXN; (+) strand; PAM type: YTN; PAM sequence: TTA
  source 1..20: mol_type = other DNA
caagtggcctgtggctcctg

SEQ ID NO: 36048 - DNA, 20 bp, synthetic construct
  misc_feature 1..20: note = Description of Artificial Sequence: Synthetic oligonucleotide
  misc_feature 1..20: note = Target: FXN; (+) strand; PAM type: YTN; PAM sequence: CTG
  source 1..20: mol_type = other DNA
tggctcctggcgccccgccc

SEQ ID NO: 36049 - DNA, 20 bp, synthetic construct
  misc_feature 1..20: note = Description of Artificial Sequence: Synthetic oligonucleotide
  misc_feature 1..20: note = Target: FXN; (+) strand; PAM type: YTN; PAM sequence: CTC
  source 1..20: mol_type = other DNA
ctggcgccccgcccacagct

SEQ ID NO: 36050 - DNA, 20 bp, synthetic construct
  misc_feature 1..20: note = Description of Artificial Sequence: Synthetic oligonucleotide
  misc_feature 1..20: note = Target: FXN; (+) strand; PAM type: YTN; PAM sequence: CTG
  source 1..20: mol_type = other DNA
gcgccccgcccacagctgac

SEQ ID NO: 36051 - DNA, 20 bp, synthetic construct
  misc_feature 1..20: note = Description of Artificial Sequence: Synthetic oligonucleotide
  misc_feature 1..20: note = Target: FXN; (+) strand; PAM type: YTN; PAM sequence: CTG
  source 1..20: mol_type = other DNA
acaggggctcagaagtgcta

SEQ ID NO: 36052 - DNA, 20 bp, synthetic construct
  misc_feature 1..20: note = Description of Artificial Sequence: Synthetic oligonucleotide
  misc_feature 1..20: note = Target: FXN; (+) strand; PAM type: YTN; PAM sequence: CTC
  source 1..20: mol_type = other DNA
agaagtgctagggggaccat

SEQ ID NO: 36053 - DNA, 20 bp, synthetic construct
  misc_feature 1..20: note = Description of Artificial Sequence: Synthetic oligonucleotide
  misc_feature 1..20: note = Target: FXN; (+) strand; PAM type: YTN; PAM sequence: CTA
  source 1..20: mol_type = other DNA
gggggaccatgggccaccag

SEQ ID NO: 36054 - DNA, 20 bp, synthetic construct
  misc_feature 1..20: note = Description of Artificial Sequence: Synthetic oligonucleotide
  misc_feature 1..20: note = Target: FXN; (+) strand; PAM type: YTN; PAM sequence: CTT
  source 1..20: mol_type = other DNA
ggatgcagaacaccagctgg

SEQ ID NO: 36055 - DNA, 20 bp, synthetic construct
  misc_feature 1..20: note = Description of Artificial Sequence: Synthetic oligonucleotide
  misc_feature 1..20: note = Target: FXN; (+) strand; PAM type: YTN; PAM sequence: TTG
  source 1..20: mol_type = other DNA
gatgcagaacaccagctggt

SEQ ID NO: 36056 - DNA, 20 bp, synthetic construct
  misc_feature 1..20: note = Description of Artificial Sequence: Synthetic oligonucleotide
  misc_feature 1..20: note = Target: FXN; (+) strand; PAM type: YTN; PAM sequence: CTG
  source 1..20: mol_type = other DNA
gtttgattctgttttccctg

SEQ ID NO: 36057 - DNA, 20 bp, synthetic construct
  misc_feature 1..20: note = Description of Artificial Sequence: Synthetic oligonucleotide
  misc_feature 1..20: note = Target: FXN; (+) strand; PAM type: YTN; PAM sequence: TTT
  source 1..20: mol_type = other DNA
gattctgttttccctgtacc

SEQ ID NO: 36058 - DNA, 20 bp, synthetic construct
  misc_feature 1..20: note = Description of Artificial Sequence: Synthetic oligonucleotide
  misc_feature 1..20: note = Target: FXN; (+) strand; PAM type: YTN; PAM sequence: TTG
  source 1..20: mol_type = other DNA
attctgttttccctgtacct

SEQ ID NO: 36059 - DNA, 20 bp, synthetic construct
  misc_feature 1..20: note = Description of Artificial Sequence: Synthetic oligonucleotide
  misc_feature 1..20: note = Target: FXN; (+) strand; PAM type: YTN; PAM sequence: TTC
  source 1..20: mol_type = other DNA
tgttttccctgtacctgggt

SEQ ID NO: 36060 - DNA, 20 bp, synthetic construct
  misc_feature 1..20: note = Description of Artificial Sequence: Synthetic oligonucleotide
  misc_feature 1..20: note = Target: FXN; (+) strand; PAM type: YTN; PAM sequence: CTG
  source 1..20: mol_type = other DNA
ttttccctgtacctgggtcc

SEQ ID NO: 36061 - DNA, 20 bp, synthetic construct
  misc_feature 1..20: note = Description of Artificial Sequence: Synthetic oligonucleotide
  misc_feature 1..20: note = Target: FXN; (+) strand; PAM type: YTN; PAM sequence: TTT
  source 1..20: mol_type = other DNA
tccctgtacctgggtcctga

SEQ ID NO: 36062 - DNA, 20 bp, synthetic construct
  misc_feature 1..20: note = Description of Artificial Sequence: Synthetic oligonucleotide
  misc_feature 1..20: note = Target: FXN; (+) strand; PAM type: YTN; PAM sequence: TTT
  source 1..20: mol_type = other DNA
ccctgtacctgggtcctgaa

SEQ ID NO: 36063 - DNA, 20 bp, synthetic construct
  misc_feature 1..20: note = Description of Artificial Sequence: Synthetic oligonucleotide
  misc_feature 1..20: note = Target: FXN; (+) strand; PAM type: YTN; PAM sequence: TTC
  source 1..20: mol_type = other DNA
cctgtacctgggtcctgaat

SEQ ID NO: 36064 - DNA, 20 bp, synthetic construct
  misc_feature 1..20: note = Description of Artificial Sequence: Synthetic oligonucleotide
  misc_feature 1..20: note = Target: FXN; (+) strand; PAM type: YTN; PAM sequence: CTG
  source 1..20: mol_type = other DNA
tacctgggtcctgaatgccc

SEQ ID NO: 36065 - DNA, 20 bp, synthetic construct
  misc_feature 1..20: note = Description of Artificial Sequence: Synthetic oligonucleotide
  misc_feature 1..20: note = Target: FXN; (+) strand; PAM type: YTN; PAM sequence: CTG
  source 1..20: mol_type = other DNA
ggtcctgaatgcccagaggc

SEQ ID NO: 36066 - DNA, 20 bp, synthetic construct
  misc_feature 1..20: note = Description of Artificial Sequence: Synthetic oligonucleotide
  misc_feature 1..20: note = Target: FXN; (+) strand; PAM type: YTN; PAM sequence: CTG
  source 1..20: mol_type = other DNA
aatgcccagaggctcaggga

SEQ ID NO: 36067 - DNA, 20 bp, synthetic construct
  misc_feature 1..20: note = Description of Artificial Sequence: Synthetic oligonucleotide
  misc_feature 1..20: note = Target: FXN; (+) strand; PAM type: YTN; PAM sequence: CTC
  source 1..20: mol_type = other DNA
agggaaacaccagccagtgc

SEQ ID NO: 36068 - DNA, 20 bp, synthetic construct
  misc_feature 1..20: note = Description of Artificial Sequence: Synthetic oligonucleotide
  misc_feature 1..20: note = Target: FXN; (+) strand; PAM type: YTN; PAM sequence: CTG
  source 1..20: mol_type = other DNA
ctgcctttaaagcacttttg

SEQ ID NO: 36069 - DNA, 20 bp, synthetic construct
  misc_feature 1..20: note = Description of Artificial Sequence: Synthetic oligonucleotide
  misc_feature 1..20: note = Target: FXN; (+) strand; PAM type: YTN; PAM sequence: CTG
  source 1..20: mol_type = other DNA
cctttaaagcacttttgact

SEQ ID NO: 36070 - DNA, 20 bp, synthetic construct
  misc_feature 1..20: note = Description of Artificial Sequence: Synthetic oligonucleotide
  misc_feature 1..20: note = Target: FXN; (+) strand; PAM type: YTN; PAM sequence: CTT
  source 1..20: mol_type = other DNA
taaagcacttttgactgatc

SEQ ID NO: 36071 - DNA, 20 bp, synthetic construct
  misc_feature 1..20: note = Description of Artificial Sequence: Synthetic oligonucleotide
  misc_feature 1..20: note = Target: FXN; (+) strand; PAM type: YTN; PAM sequence: TTT
  source 1..20: mol_type = other DNA
aaagcacttttgactgatct

SEQ ID NO: 36072 - DNA, 20 bp, synthetic construct
  misc_feature 1..20: note = Description of Artificial Sequence: Synthetic oligonucleotide
  misc_feature 1..20: note = Target: FXN; (+) strand; PAM type: YTN; PAM sequence: TTA
  source 1..20: mol_type = other DNA
aagcacttttgactgatctc

SEQ ID NO: 36073 - DNA, 20 bp, synthetic construct
  misc_feature 1..20: note = Description of Artificial Sequence: Synthetic oligonucleotide
  misc_feature 1..20: note = Target: FXN; (+) strand; PAM type: YTN; PAM sequence: CTT
  source 1..20: mol_type = other DNA
ttgactgatctcttgttaat

SEQ ID NO: 36074 - DNA, 20 bp, synthetic construct
  misc_feature 1..20: note = Description of Artificial Sequence: Synthetic oligonucleotide
  misc_feature 1..20: note = Target: FXN; (+) strand; PAM type: YTN; PAM sequence: TTT
  source 1..20: mol_type = other DNA
tgactgatctcttgttaatt

SEQ ID NO: 36075 - DNA, 20 bp, synthetic construct
  misc_feature 1..20: note = Description of Artificial Sequence: Synthetic oligonucleotide
  misc_feature 1..20: note = Target: FXN; (+) strand; PAM type: YTN; PAM sequence: TTT
  source 1..20: mol_type = other DNA
gactgatctcttgttaattt

SEQ ID NO: 36076 - DNA, 20 bp, synthetic construct
  misc_feature 1..20: note = Description of Artificial Sequence: Synthetic oligonucleotide
  misc_feature 1..20: note = Target: FXN; (+) strand; PAM type: YTN; PAM sequence: TTG
  source 1..20: mol_type = other DNA
actgatctcttgttaattta

SEQ ID NO: 36077 - DNA, 20 bp, synthetic construct
  misc_feature 1..20: note = Description of Artificial Sequence: Synthetic oligonucleotide
  misc_feature 1..20: note = Target: FXN; (+) strand; PAM type: YTN; PAM sequence: CTG
  source 1..20: mol_type = other DNA
atctcttgttaatttagcaa

SEQ ID NO: 36078 - DNA, 20 bp, synthetic construct
  misc_feature 1..20: note = Description of Artificial Sequence: Synthetic oligonucleotide
  misc_feature 1..20: note = Target: FXN; (+) strand; PAM type: YTN; PAM sequence: CTC
  source 1..20: mol_type = other DNA
ttgttaatttagcaactgtt

SEQ ID NO: 36079 - DNA, 20 bp, synthetic construct
  misc_feature 1..20: note = Description of Artificial Sequence: Synthetic oligonucleotide
  misc_feature 1..20: note = Target: FXN; (+) strand; PAM type: YTN; PAM sequence: CTT
  source 1..20: mol_type = other DNA
gttaatttagcaactgttat

SEQ ID NO: 36080 - DNA, 20 bp, synthetic construct
  misc_feature 1..20: note = Description of Artificial Sequence: Synthetic oligonucleotide
  misc_feature 1..20: note = Target: FXN; (+) strand; PAM type: YTN; PAM sequence: TTG
  source 1..20: mol_type = other DNA
ttaatttagcaactgttatt

SEQ ID NO: 36081 - DNA, 20 bp, synthetic construct
  misc_feature 1..20: note = Description of Artificial Sequence: Synthetic oligonucleotide
  misc_feature 1..20: note = Target: FXN; (+) strand; PAM type: YTN; PAM sequence: TTA
  source 1..20: mol_type = other DNA
atttagcaactgttattggt

SEQ ID NO: 36082 - DNA, 20 bp, synthetic construct
  misc_feature 1..20: note = Description of Artificial Sequence: Synthetic oligonucleotide
  misc_feature 1..20: note = Target: FXN; (+) strand; PAM type: YTN; PAM sequence: TTT
  source 1..20: mol_type = other DNA
agcaactgttattggttgat

SEQ ID NO: 36083 - DNA, 20 bp, synthetic construct
  misc_feature 1..20: note = Description of Artificial Sequence: Synthetic oligonucleotide
  misc_feature 1..20: note = Target: FXN; (+) strand; PAM type: YTN; PAM sequence: TTA
  source 1..20: mol_type = other DNA
gcaactgttattggttgatg

SEQ ID NO: 36084 - DNA, 20 bp, synthetic construct
  misc_feature 1..20: note = Description of Artificial Sequence: Synthetic oligonucleotide
  misc_feature 1..20: note = Target: FXN; (+) strand; PAM type: YTN; PAM sequence: CTG
  source 1..20: mol_type = other DNA
ttattggttgatgctgcagt

SEQ ID NO: 36085 - DNA, 20 bp, synthetic construct
  misc_feature 1..20: note = Description of Artificial Sequence: Synthetic oligonucleotide
  misc_feature 1..20: note = Target: FXN; (+) strand; PAM type: YTN; PAM sequence: TTA
  source 1..20: mol_type = other DNA
ttggttgatgctgcagttgc

SEQ ID NO: 36086 - DNA, 20 bp, synthetic construct
  misc_feature 1..20: note = Description of Artificial Sequence: Synthetic oligonucleotide
  misc_feature 1..20: note = Target: FXN; (+) strand; PAM type: YTN; PAM sequence: TTG
  source 1..20: mol_type = other DNA
gttgatgctgcagttgctct

SEQ ID NO: 36087 - DNA, 20 bp, synthetic construct
  misc_feature 1..20: note = Description of Artificial Sequence: Synthetic oligonucleotide
  misc_feature 1..20: note = Target: FXN; (+) strand; PAM type: YTN; PAM sequence: TTG
  source 1..20: mol_type = other DNA
atgctgcagttgctcttatt

SEQ ID NO: 36088 - DNA, 20 bp, synthetic construct
  misc_feature 1..20: note = Description of Artificial Sequence: Synthetic oligonucleotide
  misc_feature 1..20: note = Target: FXN; (+) strand; PAM type: YTN; PAM sequence: CTG
  source 1..20: mol_type = other DNA
cagttgctcttattgaagtt

SEQ ID NO: 36089 - DNA, 20 bp, synthetic construct
  misc_feature 1..20: note = Description of Artificial Sequence: Synthetic oligonucleotide
  misc_feature 1..20: note = Target: FXN; (+) strand; PAM type: YTN; PAM sequence: TTG
  source 1..20: mol_type = other DNA
ctcttattgaagtttgattg

SEQ ID NO: 36090 - DNA, 20 bp, synthetic construct
  misc_feature 1..20: note = Description of Artificial Sequence: Synthetic oligonucleotide
  misc_feature 1..20: note = Target: FXN; (+) strand; PAM type: YTN; PAM sequence: CTC
  source 1..20: mol_type = other DNA
ttattgaagtttgattgata

SEQ ID NO: 36091 - DNA, 20 bp, synthetic construct
  misc_feature 1..20: note = Description of Artificial Sequence: Synthetic oligonucleotide
  misc_feature 1..20: note = Target: FXN; (+) strand; PAM type: YTN; PAM sequence: CTT
  source 1..20: mol_type = other DNA
attgaagtttgattgatagc

SEQ ID NO: 36092 - DNA, 20 bp, synthetic construct
  misc_feature 1..20: note = Description of Artificial Sequence: Synthetic oligonucleotide
  misc_feature 1..20: note = Target: FXN; (+) strand; PAM type: YTN; PAM sequence: TTA
  source 1..20: mol_type = other DNA
ttgaagtttgattgatagca

SEQ ID NO: 36093 - DNA, 20 bp, synthetic construct
  misc_feature 1..20: note = Description of Artificial Sequence: Synthetic oligonucleotide
  misc_feature 1..20: note = Target: FXN; (+) strand; PAM type: YTN; PAM sequence: TTG
  source 1..20: mol_type = other DNA
aagtttgattgatagcatta

SEQ ID NO: 36094 - DNA, 20 bp, synthetic construct
  misc_feature 1..20: note = Description of Artificial Sequence: Synthetic oligonucleotide
  misc_feature 1..20: note = Target: FXN; (+) strand; PAM type: YTN; PAM sequence: TTT
  source 1..20: mol_type = other DNA
gattgatagcattaggatgg

SEQ ID NO: 36095 - DNA, 20 bp, synthetic construct
  misc_feature 1..20: note = Description of Artificial Sequence: Synthetic oligonucleotide
  misc_feature 1..20: note = Target: FXN; (+) strand; PAM type: YTN; PAM sequence: TTG
  source 1..20: mol_type = other DNA
attgatagcattaggatggt

SEQ ID NO: 36096 - DNA, 20 bp, synthetic construct
  misc_feature 1..20: note = Description of Artificial Sequence: Synthetic oligonucleotide
  misc_feature 1..20: note = Target: FXN; (+) strand; PAM type: YTN; PAM sequence: TTG
  source 1..20: mol_type = other DNA
atagcattaggatggtaagg

SEQ ID NO: 36097 - DNA, 20 bp, synthetic construct
  misc_feature 1..20: note = Description of Artificial Sequence: Synthetic oligonucleotide
  misc_feature 1..20: note = Target: FXN; (+) strand; PAM type: YTN; PAM sequence: TTA
  source 1..20: mol_type = other DNA
ggatggtaaggcactatttt

SEQ ID NO: 36098 - DNA, 20 bp, synthetic construct
  misc_feature 1..20: note = Description of Artificial Sequence: Synthetic oligonucleotide
  misc_feature 1..20: note = Target: FXN; (+) strand; PAM type: YTN; PAM sequence: CTA
  source 1..20: mol_type = other DNA
tttttcaaataaaggttgtt

SEQ ID NO: 36099 - DNA, 20 bp, synthetic construct
  misc_feature 1..20: note = Description of Artificial Sequence: Synthetic oligonucleotide
  misc_feature 1..20: note = Target: FXN; (+) strand; PAM type: YTN; PAM sequence: TTT
  source 1..20: mol_type = other DNA
ttcaaataaaggttgtttaa

SEQ ID NO: 36100 - DNA, 20 bp, synthetic construct
  misc_feature 1..20: note = Description of Artificial Sequence: Synthetic oligonucleotide
  misc_feature 1..20: note = Target: FXN; (+) strand; PAM type: YTN; PAM sequence: TTT
  source 1..20: mol_type = other DNA
tcaaataaaggttgtttaat

SEQ ID NO: 36101 - DNA, 20 bp, synthetic construct
  misc_feature 1..20: note = Description of Artificial Sequence: Synthetic oligonucleotide
  misc_feature 1..20: note = Target: FXN; (+) strand; PAM type: YTN; PAM sequence: TTT
  source 1..20: mol_type = other DNA
caaataaaggttgtttaata

SEQ ID NO: 36102 - DNA, 20 bp, synthetic construct
  misc_feature 1..20: note = Description of Artificial Sequence: Synthetic oligonucleotide
  misc_feature 1..20: note = Target: FXN; (+) strand; PAM type: YTN; PAM sequence: TTC
  source 1..20: mol_type = other DNA
aaataaaggttgtttaatat

SEQ ID NO: 36103 - DNA, 20 bp, synthetic construct
  misc_feature 1..20: note = Description of Artificial Sequence: Synthetic oligonucleotide
  misc_feature 1..20: note = Target: FXN; (+) strand; PAM type: YTN; PAM sequence: TTG
  source 1..20: mol_type = other DNA
tttaatataaaaaaaatttt

SEQ ID NO: 36104 - DNA, 20 bp, synthetic construct
  misc_feature 1..20: note = Description of Artificial Sequence: Synthetic oligonucleotide
  misc_feature 1..20: note = Target: FXN; (+) strand; PAM type: YTN; PAM sequence: TTT
  source 1..20: mol_type = other DNA
aatataaaaaaaattttgtt

SEQ ID NO: 36105 - DNA, 20 bp, synthetic construct
  misc_feature 1..20: note = Description of Artificial Sequence: Synthetic oligonucleotide
  misc_feature 1..20: note = Target: FXN; (+) strand; PAM type: YTN; PAM sequence: TTA
  source 1..20: mol_type = other DNA
atataaaaaaaattttgttt

SEQ ID NO: 36106 - DNA, 20 bp, synthetic construct
  misc_feature 1..20: note = Description of Artificial Sequence: Synthetic oligonucleotide
  misc_feature 1..20: note = Target: FXN; (+) strand; PAM type: YTN; PAM sequence: TTT
  source 1..20: mol_type = other DNA
tgtttttttttctctcagcc

SEQ ID NO: 36107 - DNA, 20 bp, synthetic construct
  misc_feature 1..20: note = Description of Artificial Sequence: Synthetic oligonucleotide
  misc_feature 1..20: note = Target: FXN; (+) strand; PAM type: YTN; PAM sequence: TTT
  source 1..20: mol_type = other DNA
gtttttttttctctcagcct

SEQ ID NO: 36108 - DNA, 20 bp, synthetic construct
  misc_feature 1..20: note = Description of Artificial Sequence: Synthetic oligonucleotide
  misc_feature 1..20: note = Target: FXN; (+) strand; PAM type: YTN; PAM sequence: TTG
  source 1..20: mol_type = other DNA
tttttttttctctcagcctt

SEQ ID NO: 36109 - DNA, 20 bp, synthetic construct
  misc_feature 1..20: note = Description of Artificial Sequence: Synthetic oligonucleotide
  misc_feature 1..20: note = Target: FXN; (+) strand; PAM type: YTN; PAM sequence: TTT
  source 1..20: mol_type = other DNA
ttttttctctcagcctttca

SEQ ID NO: 36110 - DNA, 20 bp, synthetic construct
  misc_feature 1..20: note = Description of Artificial Sequence: Synthetic oligonucleotide
  misc_feature 1..20: note = Target: FXN; (+) strand; PAM type: YTN; PAM sequence: TTT
  source 1..20: mol_type = other DNA
tttttctctcagcctttcac

SEQ ID NO: 36111 - DNA, 20 bp, synthetic construct
  misc_feature 1..20: note = Description of Artificial Sequence: Synthetic oligonucleotide
  misc_feature 1..20: note = Target: FXN; (+) strand; PAM type: YTN; PAM sequence: TTT
  source 1..20: mol_type = other DNA
ttttctctcagcctttcaca

SEQ ID NO: 36112 - DNA, 20 bp, synthetic construct
  misc_feature 1..20: note = Description of Artificial Sequence: Synthetic oligonucleotide
  misc_feature 1..20: note = Target: FXN; (+) strand; PAM type: YTN; PAM sequence: TTT
  source 1..20: mol_type = other DNA
tttctctcagcctttcacat

SEQ ID NO: 36113 - DNA, 20 bp, synthetic construct
  misc_feature 1..20: note = Description of Artificial Sequence: Synthetic oligonucleotide
  misc_feature 1..20: note = Target: FXN; (+) strand; PAM type: YTN; PAM sequence: TTT
  source 1..20: mol_type = other DNA
ttctctcagcctttcacatt

SEQ ID NO: 36114 - DNA, 20 bp, synthetic construct
  misc_feature 1..20: note = Description of Artificial Sequence: Synthetic oligonucleotide
  misc_feature 1..20: note = Target: FXN; (+) strand; PAM type: YTN; PAM sequence: TTT
  source 1..20: mol_type = other DNA
tctctcagcctttcacattg

SEQ ID NO: 36115 - DNA, 20 bp, synthetic construct
  misc_feature 1..20: note = Description of Artificial Sequence: Synthetic oligonucleotide
  misc_feature 1..20: note = Target: FXN; (+) strand; PAM type: YTN; PAM sequence: TTT
  source 1..20: mol_type = other DNA
ctctcagcctttcacattgg

SEQ ID NO: 36116 - DNA, 20 bp, synthetic construct
  misc_feature 1..20: note = Description of Artificial Sequence: Synthetic oligonucleotide
  misc_feature 1..20: note = Target: FXN; (+) strand; PAM type: YTN; PAM sequence: TTC
  source 1..20: mol_type = other DNA
tctcagcctttcacattggt

SEQ ID NO: 36117 - DNA, 20 bp, synthetic construct
  misc_feature 1..20: note = Description of Artificial Sequence: Synthetic oligonucleotide
  misc_feature 1..20: note = Target: FXN; (+) strand; PAM type: YTN; PAM sequence: CTC
  source 1..20: mol_type = other DNA
tcagcctttcacattggttc

SEQ ID NO: 36118 - DNA, 20 bp, synthetic construct
  misc_feature 1..20: note = Description of Artificial Sequence: Synthetic oligonucleotide
  misc_feature 1..20: note = Target: FXN; (+) strand; PAM type: YTN; PAM sequence: CTC
  source 1..20: mol_type = other DNA
agcctttcacattggttcaa

SEQ ID NO: 36119 - DNA, 20 bp, synthetic construct
  misc_feature 1..20: note = Description of Artificial Sequence: Synthetic oligonucleotide
  misc_feature 1..20: note = Target: FXN; (+) strand; PAM type: YTN; PAM sequence: CTT
  source 1..20: mol_type = other DNA
tcacattggttcaaaatatc

SEQ ID NO: 36120 - DNA, 20 bp, synthetic construct
  misc_feature 1..20: note = Description of Artificial Sequence: Synthetic oligonucleotide
  misc_feature 1..20: note = Target: FXN; (+) strand; PAM type: YTN; PAM sequence: TTT
  source 1..20: mol_type = other DNA
cacattggttcaaaatatct

SEQ ID NO: 36121 - DNA, 20 bp, synthetic construct
  misc_feature 1..20: note = Description of Artificial Sequence: Synthetic oligonucleotide
  misc_feature 1..20: note = Target: FXN; (+) strand; PAM type: YTN; PAM sequence: TTC
  source 1..20: mol_type = other DNA
acattggttcaaaatatctt

SEQ ID NO: 36122 - DNA, 20 bp, synthetic construct
  misc_feature 1..20: note = Description of Artificial Sequence: Synthetic oligonucleotide
  misc_feature 1..20: note = Target: FXN; (+) strand; PAM type: YTN; PAM sequence: TTG
  source 1..20: mol_type = other DNA
gttcaaaatatctttcatct

SEQ ID NO: 36123 - DNA, 20 bp, synthetic construct
  misc_feature 1..20: note = Description of Artificial Sequence: Synthetic oligonucleotide
  misc_feature 1..20: note = Target: FXN; (+) strand; PAM type: YTN; PAM sequence: TTC
  source 1..20: mol_type = other DNA
aaaatatctttcatctggct

SEQ ID NO: 36124 - DNA, 20 bp, synthetic construct
  misc_feature 1..20: note = Description of Artificial Sequence: Synthetic oligonucleotide
  misc_feature 1..20: note = Target: FXN; (+) strand; PAM type: YTN; PAM sequence: CTT
  source 1..20: mol_type = other DNA
tcatctggctgcatttctga

SEQ ID NO: 36125 - DNA, 20 bp, synthetic construct
  misc_feature 1..20: note = Description of Artificial Sequence: Synthetic oligonucleotide
  misc_feature 1..20: note = Target: FXN; (+) strand; PAM type: YTN; PAM sequence: TTT
  source 1..20: mol_type = other DNA
catctggctgcatttctgat

SEQ ID NO: 36126 - DNA, 20 bp, synthetic construct
  misc_feature 1..20: note = Description of Artificial Sequence: Synthetic oligonucleotide
  misc_feature 1..20: note = Target: FXN; (+) strand; PAM type: YTN; PAM sequence: TTC
  source 1..20: mol_type = other DNA
atctggctgcatttctgatt

SEQ ID NO: 36127 - DNA, 20 bp, synthetic construct
  misc_feature 1..20: note = Description of Artificial Sequence: Synthetic oligonucleotide
  misc_feature 1..20: note = Target: FXN; (+) strand; PAM type: YTN; PAM sequence: CTG
  source 1..20: mol_type = other DNA
gctgcatttctgatttttgt

SEQ ID NO: 36128 - DNA, 20 bp, synthetic construct
  misc_feature 1..20: note = Description of Artificial Sequence: Synthetic oligonucleotide
  misc_feature 1..20: note = Target: FXN; (+) strand; PAM type: YTN; PAM sequence: CTG
  source 1..20: mol_type = other DNA
catttctgatttttgttttg

SEQ ID NO: 36129 - DNA, 20 bp, synthetic construct
  misc_feature 1..20: note = Description of Artificial Sequence: Synthetic oligonucleotide
  misc_feature 1..20: note = Target: FXN; (+) strand; PAM type: YTN; PAM sequence: TTT
  source 1..20: mol_type = other DNA
ctgatttttgttttgttttt

SEQ ID NO: 36130 - DNA, 20 bp, synthetic construct
  misc_feature 1..20: note = Description of Artificial Sequence: Synthetic oligonucleotide
  misc_feature 1..20: note = Target: FXN; (+) strand; PAM type: YTN; PAM sequence: TTC
  source 1..20: mol_type = other DNA
tgatttttgttttgtttttt

SEQ ID NO: 36131 - DNA, 20 bp, synthetic construct
  misc_feature 1..20: note = Description of Artificial Sequence: Synthetic oligonucleotide
  misc_feature 1..20: note = Target: FXN; (+) strand; PAM type: YTN; PAM sequence: CTG
  source 1..20: mol_type = other DNA
atttttgttttgtttttttt

SEQ ID NO: 36132 - DNA, 20 bp, synthetic construct
  misc_feature 1..20: note = Description of Artificial Sequence: Synthetic oligonucleotide
  misc_feature 1..20: note = Target: FXN; (+) strand; PAM type: YTN; PAM sequence: TTT
  source 1..20: mol_type = other DNA
ttgttttgttttttttttct

SEQ ID NO: 36133 - DNA, 20 bp, synthetic construct
  misc_feature 1..20: note = Description of Artificial Sequence: Synthetic oligonucleotide
  misc_feature 1..20: note = Target: FXN; (+) strand; PAM type: YTN; PAM sequence: TTT
  source 1..20: mol_type = other DNA
tgttttgttttttttttctt

SEQ ID NO: 36134 - DNA, 20 bp, synthetic construct
  misc_feature 1..20: note = Description of Artificial Sequence: Synthetic oligonucleotide
  misc_feature 1..20: note = Target: FXN; (+) strand; PAM type: YTN; PAM sequence: TTT
  source 1..20: mol_type = other DNA
gttttgttttttttttctta

SEQ ID NO: 36135 - DNA, 20 bp, synthetic construct
  misc_feature 1..20: note = Description of Artificial Sequence: Synthetic oligonucleotide
  misc_feature 1..20: note = Target: FXN; (+) strand; PAM type: YTN; PAM sequence: TTG
  source 1..20: mol_type = other DNA
ttttgttttttttttcttaa

SEQ ID NO: 36136 - DNA, 20 bp, synthetic construct
  misc_feature 1..20: note = Description of Artificial Sequence: Synthetic oligonucleotide
  misc_feature 1..20: note = Target: FXN; (+) strand; PAM type: YTN; PAM sequence: TTT
  source 1..20: mol_type = other DNA
tgttttttttttcttaattt

SEQ ID NO: 36137 - DNA, 20 bp, synthetic construct
  misc_feature 1..20: note = Description of Artificial Sequence: Synthetic oligonucleotide
  misc_feature 1..20: note = Target: FXN; (+) strand; PAM type: YTN; PAM sequence: TTT
  source 1..20: mol_type = other DNA
gttttttttttcttaatttt

SEQ ID NO: 36138 - DNA, 20 bp, synthetic construct
  misc_feature 1..20: note = Description of Artificial Sequence: Synthetic oligonucleotide
  misc_feature 1..20: note = Target: FXN; (+) strand; PAM type: YTN; PAM sequence: TTG
  source 1..20: mol_type = other DNA
ttttttttttcttaatttta

SEQ ID NO: 36139 - DNA, 20 bp, synthetic construct
  misc_feature 1..20: note = Description of Artificial Sequence: Synthetic oligonucleotide
  misc_feature 1..20: note = Target: FXN; (+) strand; PAM type: YTN; PAM sequence: TTT
  source 1..20: mol_type = other DNA
tttttttcttaattttattt

SEQ ID NO: 36140 - DNA, 20 bp, synthetic construct
  misc_feature 1..20: note = Description of Artificial Sequence: Synthetic oligonucleotide
  misc_feature 1..20: note = Target: FXN; (+) strand; PAM type: YTN; PAM sequence: TTT
  source 1..20: mol_type = other DNA
ttttttcttaattttattta

SEQ ID NO: 36141 - DNA, 20 bp, synthetic construct
  misc_feature 1..20: note = Description of Artificial Sequence: Synthetic oligonucleotide
  misc_feature 1..20: note = Target: FXN; (+) strand; PAM type: YTN; PAM sequence: TTT
  source 1..20: mol_type = other DNA
tttttcttaattttatttat

SEQ ID NO: 36142 - DNA, 20 bp, synthetic construct
  misc_feature 1..20: note = Description of Artificial Sequence: Synthetic oligonucleotide
  misc_feature 1..20: note = Target: FXN; (+) strand; PAM type: YTN; PAM sequence: TTT
  source 1..20: mol_type = other DNA
ttttcttaattttatttatt

SEQ ID NO: 36143 - DNA, 20 bp, synthetic construct
  misc_feature 1..20: note = Description of Artificial Sequence: Synthetic oligonucleotide
  misc_feature 1..20: note = Target: FXN; (+) strand; PAM type: YTN; PAM sequence: TTT
  source 1..20: mol_type = other DNA
tttcttaattttatttattt

SEQ ID NO: 36144 - DNA, 20 bp, synthetic construct
  misc_feature 1..20: note = Description of Artificial Sequence: Synthetic oligonucleotide
  misc_feature 1..20: note = Target: FXN; (+) strand; PAM type: YTN; PAM sequence: TTT
  source 1..20: mol_type = other DNA
ttcttaattttatttatttt

SEQ ID NO: 36145 - DNA, 20 bp, synthetic construct
  misc_feature 1..20: note = Description of Artificial Sequence: Synthetic oligonucleotide
  misc_feature 1..20: note = Target: FXN; (+) strand; PAM type: YTN; PAM sequence: TTT
  source 1..20: mol_type = other DNA
tcttaattttatttattttt

SEQ ID NO: 36146 - DNA, 20 bp, synthetic construct
  misc_feature 1..20: note = Description of Artificial Sequence: Synthetic oligonucleotide
  misc_feature 1..20: note = Target: FXN; (+) strand; PAM type: YTN; PAM sequence: TTT
  source 1..20: mol_type = other DNA
cttaattttatttattttta

SEQ ID NO: 36147 - DNA, 20 bp, synthetic construct
  misc_feature 1..20: note = Description of Artificial Sequence: Synthetic oligonucleotide
  misc_feature 1..20: note = Target: FXN; (+) strand; PAM type: YTN; PAM sequence: TTC
  source 1..20: mol_type = other DNA
ttaattttatttatttttaa

SEQ ID NO: 36148 - DNA, 20 bp, synthetic construct
  misc_feature 1..20: note = Description of Artificial Sequence: Synthetic oligonucleotide
  misc_feature 1..20: note = Target: FXN; (+) strand; PAM type: YTN; PAM sequence: CTT
  source 1..20: mol_type = other DNA
aattttatttatttttaatt

SEQ ID NO: 36149 - DNA, 20 bp, synthetic construct
  misc_feature 1..20: note = Description of Artificial Sequence: Synthetic oligonucleotide
  misc_feature 1..20: note = Target: FXN; (+) strand; PAM type: YTN; PAM sequence: TTA
  source 1..20: mol_type = other DNA
attttatttatttttaatta

SEQ ID NO: 36150 - DNA, 20 bp, synthetic construct
  misc_feature 1..20: note = Description of Artificial Sequence: Synthetic oligonucleotide
  misc_feature 1..20: note = Target: FXN; (+) strand; PAM type: YTN; PAM sequence: TTT
  source 1..20: mol_type = other DNA
tatttatttttaattaaaaa

SEQ ID NO: 36151 - DNA, 20 bp, synthetic construct
  misc_feature 1..20: note = Description of Artificial Sequence: Synthetic oligonucleotide
  misc_feature 1..20: note = Target: FXN; (+) strand; PAM type: YTN; PAM sequence: TTT
  source 1..20: mol_type = other DNA
atttatttttaattaaaaat

SEQ ID NO: 36152 - DNA, 20 bp, synthetic construct
  misc_feature 1..20: note = Description of Artificial Sequence: Synthetic oligonucleotide
  misc_feature 1..20: note = Target: FXN; (+) strand; PAM type: YTN; PAM sequence: TTA
  source 1..20: mol_type = other DNA
tttatttttaattaaaaata

SEQ ID NO: 36153 - DNA, 20 bp, synthetic construct
  misc_feature 1..20: note = Description of Artificial Sequence: Synthetic oligonucleotide
  misc_feature 1..20: note = Target: FXN; (+) strand; PAM type: YTN; PAM sequence: TTT
  source 1..20: mol_type = other DNA
atttttaattaaaaataatt

SEQ ID NO: 36154 - DNA, 20 bp, synthetic construct
  misc_feature 1..20: note = Description of Artificial Sequence: Synthetic oligonucleotide
  misc_feature 1..20: note = Target: FXN; (+) strand; PAM type: YTN; PAM sequence: TTA
  source 1..20: mol_type = other DNA
tttttaattaaaaataattt

SEQ ID NO: 36155 - DNA, 20 bp, synthetic construct
  misc_feature 1..20: note = Description of Artificial Sequence: Synthetic oligonucleotide
  misc_feature 1..20: note = Target: FXN; (+) strand; PAM type: YTN; PAM sequence: TTT
  source 1..20: mol_type = other DNA
ttaattaaaaataatttttt

SEQ ID NO: 36156 - DNA, 20 bp, synthetic construct
  misc_feature 1..20: note = Description of Artificial Sequence: Synthetic oligonucleotide
  misc_feature 1..20: note = Target: FXN; (+) strand; PAM type: YTN; PAM sequence: TTT
  source 1..20: mol_type = other DNA
taattaaaaataattttttt

SEQ ID NO: 36157 - DNA, 20 bp, synthetic construct
  misc_feature 1..20: note = Description of Artificial Sequence: Synthetic oligonucleotide
  misc_feature 1..20: note = Target: FXN; (+) strand; PAM type: YTN; PAM sequence: TTT
  source 1..20: mol_type = other DNA
aattaaaaataatttttttt

SEQ ID NO: 36158 - DNA, 20 bp, synthetic construct
  misc_feature 1..20: note = Description of Artificial Sequence: Synthetic oligonucleotide
  misc_feature 1..20: note = Target: FXN; (+) strand; PAM type: YTN; PAM sequence: TTA
  source 1..20: mol_type = other DNA
attaaaaataattttttttg

SEQ ID NO: 36159 - DNA, 20 bp, synthetic construct
  misc_feature 1..20: note = Description of Artificial Sequence: Synthetic oligonucleotide
  misc_feature 1..20: note = Target: FXN; (+) strand; PAM type: YTN; PAM sequence: TTA
  source 1..20: mol_type = other DNA
aaaataattttttttgtcaa

SEQ ID NO: 36160 - DNA, 20 bp, synthetic construct
  misc_feature 1..20: note = Description of Artificial Sequence: Synthetic oligonucleotide
  misc_feature 1..20: note = Target: FXN; (+) strand; PAM type: YTN; PAM sequence: TTT
  source 1..20: mol_type = other DNA
tttttgtcaacatggggtct

SEQ ID NO: 36161 - DNA, 20 bp, synthetic construct
  misc_feature 1..20: note = Description of Artificial Sequence: Synthetic oligonucleotide
  misc_feature 1..20: note = Target: FXN; (+) strand; PAM type: YTN; PAM sequence: TTT
  source 1..20: mol_type = other DNA
ttttgtcaacatggggtctc

SEQ ID NO: 36162 - DNA, 20 bp, synthetic construct
  misc_feature 1..20: note = Description of Artificial Sequence: Synthetic oligonucleotide
  misc_feature 1..20: note = Target: FXN; (+) strand; PAM type: YTN; PAM sequence: TTT
  source 1..20: mol_type = other DNA
tttgtcaacatggggtctca

SEQ ID NO: 36163 - DNA, 20 bp, synthetic construct
  misc_feature 1..20: note = Description of Artificial Sequence: Synthetic oligonucleotide
  misc_feature 1..20: note = Target: FXN; (+) strand; PAM type: YTN; PAM sequence: TTT
  source 1..20: mol_type = other DNA
ttgtcaacatggggtctcac

SEQ ID NO: 36164 - DNA, 20 bp, synthetic construct
  misc_feature 1..20: note = Description of Artificial Sequence: Synthetic oligonucleotide
  misc_feature 1..20: note = Target: FXN; (+) strand; PAM type: YTN; PAM sequence: TTT
  source 1..20: mol_type = other DNA
tgtcaacatggggtctcact

SEQ ID NO: 36165 - DNA, 20 bp, synthetic construct
  misc_feature 1..20: note = Description of Artificial Sequence: Synthetic oligonucleotide
  misc_feature 1..20: note = Target: FXN; (+) strand; PAM type: YTN; PAM sequence: TTT
  source 1..20: mol_type = other DNA
gtcaacatggggtctcactt

SEQ ID NO: 36166 - DNA, 20 bp, synthetic construct
  misc_feature 1..20: note = Description of Artificial Sequence: Synthetic oligonucleotide
  misc_feature 1..20: note = Target: FXN; (+) strand; PAM type: YTN; PAM sequence: TTG
  source 1..20: mol_type = other DNA
tcaacatggggtctcacttt

SEQ ID NO: 36167 - DNA, 20 bp, synthetic construct
  misc_feature 1..20: note = Description of Artificial Sequence: Synthetic oligonucleotide
  misc_feature 1..20: note = Target: FXN; (+) strand; PAM type: YTN; PAM sequence: CTC
  source 1..20: mol_type = other DNA
actttgttgcctaggttggt

SEQ ID NO: 36168 - DNA, 20 bp, synthetic construct
  misc_feature 1..20: note = Description of Artificial Sequence: Synthetic oligonucleotide
  misc_feature 1..20: note = Target: FXN; (+) strand; PAM type: YTN; PAM sequence: CTT
  source 1..20: mol_type = other DNA
tgttgcctaggttggtctga

SEQ ID NO: 36169 - DNA, 20 bp, synthetic construct
  misc_feature 1..20: note = Description of Artificial Sequence: Synthetic oligonucleotide
  misc_feature 1..20: note = Target: FXN; (+) strand; PAM type: YTN; PAM sequence: TTT
  source 1..20: mol_type = other DNA
gttgcctaggttggtctgaa

SEQ ID NO: 36170 - DNA, 20 bp, synthetic construct
  misc_feature 1..20: note = Description of Artificial Sequence: Synthetic oligonucleotide
  misc_feature 1..20: note = Target: FXN; (+) strand; PAM type: YTN; PAM sequence: TTG
  source 1..20: mol_type = other DNA
ttgcctaggttggtctgaaa

SEQ ID NO: 36171 - DNA, 20 bp, synthetic construct
  misc_feature 1..20: note = Description of Artificial Sequence: Synthetic oligonucleotide
  misc_feature 1..20: note = Target: FXN; (+) strand; PAM type: YTN; PAM sequence: TTG
  source 1..20: mol_type = other DNA
cctaggttggtctgaaactc

SEQ ID NO: 36172 - DNA, 20 bp, synthetic construct
  misc_feature 1..20: note = Description of Artificial Sequence: Synthetic oligonucleotide
  misc_feature 1..20: note = Target: FXN; (+) strand; PAM type: YTN; PAM sequence: CTA
  source 1..20: mol_type = other DNA
ggttggtctgaaactcgtgg

SEQ ID NO: 36173 - DNA, 20 bp, synthetic construct
  misc_feature 1..20: note = Description of Artificial Sequence: Synthetic oligonucleotide
  misc_feature 1..20: note = Target: FXN; (+) strand; PAM type: YTN; PAM sequence: TTG
  source 1..20: mol_type = other DNA
gtctgaaactcgtggcttca

SEQ ID NO: 36174 - DNA, 20 bp, synthetic construct
  misc_feature 1..20: note = Description of Artificial Sequence: Synthetic oligonucleotide
  misc_feature 1..20: note = Target: FXN; (+) strand; PAM type: YTN; PAM sequence: CTG
  source 1..20: mol_type = other DNA
aaactcgtggcttcaagcaa

SEQ ID NO: 36175 - DNA, 20 bp, synthetic construct
  misc_feature 1..20: note = Description of Artificial Sequence: Synthetic oligonucleotide
  misc_feature 1..20: note = Target: FXN; (+) strand; PAM type: YTN; PAM sequence: CTC
  source 1..20: mol_type = other DNA
gtggcttcaagcaatcctcc

SEQ ID NO: 36176 - DNA, 20 bp, synthetic construct
  misc_feature 1..20: note = Description of Artificial Sequence: Synthetic oligonucleotide
  misc_feature 1..20: note = Target: FXN; (+) strand; PAM type: YTN; PAM sequence: CTT
  source 1..20: mol_type = other DNA
caagcaatcctcccacatca

SEQ ID NO: 36177 - DNA, 20 bp, synthetic construct
  misc_feature 1..20: note = Description of Artificial Sequence: Synthetic oligonucleotide
  misc_feature 1..20: note = Target: FXN; (+) strand; PAM type: YTN; PAM sequence: TTC
  source 1..20: mol_type = other DNA
aagcaatcctcccacatcag

SEQ ID NO: 36178 - DNA, 20 bp, synthetic construct
  misc_feature 1..20: note = Description of Artificial Sequence: Synthetic oligonucleotide
  misc_feature 1..20: note = Target: FXN; (+) strand; PAM type: YTN; PAM sequence: CTC
  source 1..20: mol_type = other DNA
ccacatcagcctcccaaagt

SEQ ID NO: 36179 - DNA, 20 bp, synthetic construct
  misc_feature 1..20: note = Description of Artificial Sequence: Synthetic oligonucleotide
  misc_feature 1..20: note = Target: FXN; (+) strand; PAM type: YTN; PAM sequence: CTC
  source 1..20: mol_type = other DNA
ccaaagtgctggggttatgg

SEQ ID NO: 36180 - DNA, 20 bp, synthetic construct
  misc_feature 1..20: note = Description of Artificial Sequence: Synthetic oligonucleotide
  misc_feature 1..20: note = Target: FXN; (+) strand; PAM type: YTN; PAM sequence: CTG
  source 1..20: mol_type = other DNA
gggttatgggtgtgagccac

SEQ ID NO: 36181 - DNA, 20 bp, synthetic construct
  misc_feature 1..20: note = Description of Artificial Sequence: Synthetic oligonucleotide
  misc_feature 1..20: note = Target: FXN; (+) strand; PAM type: YTN; PAM sequence: TTA
  source 1..20: mol_type = other DNA
tgggtgtgagccactgcagc

SEQ ID NO: 36182 - DNA, 20 bp, synthetic construct
  misc_feature 1..20: note = Description of Artificial Sequence: Synthetic oligonucleotide
  misc_feature 1..20: note = Target: FXN; (+) strand; PAM type: YTN; PAM sequence: CTG
  source 1..20: mol_type = other DNA
cagcagcctgttttttttgt

SEQ ID NO: 36183 - DNA, 20 bp, synthetic construct
  misc_feature 1..20: note = Description of Artificial Sequence: Synthetic oligonucleotide
  misc_feature 1..20: note = Target: FXN; (+) strand; PAM type: YTN; PAM sequence: CTG
  source 1..20: mol_type = other DNA
ttttttttgtttgtttgttt

SEQ ID NO: 36184 - DNA, 20 bp, synthetic construct
  misc_feature 1..20: note = Description of Artificial Sequence: Synthetic oligonucleotide
  misc_feature 1..20: note = Target: FXN; (+) strand; PAM type: YTN; PAM sequence: TTT
  source 1..20: mol_type = other DNA
tttttgtttgtttgtttttt

SEQ ID NO: 36185 - DNA, 20 bp, synthetic construct
  misc_feature 1..20: note = Description of Artificial Sequence: Synthetic oligonucleotide
  misc_feature 1..20: note = Target: FXN; (+) strand; PAM type: YTN; PAM sequence: TTT
  source 1..20: mol_type = other DNA
ttttgtttgtttgttttttt

SEQ ID NO: 36186 - DNA, 20 bp, synthetic construct
  misc_feature 1..20: note = Description of Artificial Sequence: Synthetic oligonucleotide
  misc_feature 1..20: note = Target: FXN; (+) strand; PAM type: YTN; PAM sequence: TTT
  source 1..20: mol_type = other DNA
tttgtttgtttgtttttttt

SEQ ID NO: 36187 - DNA, 20 bp, synthetic construct
  misc_feature 1..20: note = Description of Artificial Sequence: Synthetic oligonucleotide
  misc_feature 1..20: note = Target: FXN; (+) strand; PAM type: YTN; PAM sequence: TTT
  source 1..20: mol_type = other DNA
ttgtttgtttgtttttttta

SEQ ID NO: 36188 - DNA, 20 bp, synthetic construct
  misc_feature 1..20: note = Description of Artificial Sequence: Synthetic oligonucleotide
  misc_feature 1..20: note = Target: FXN; (+) strand; PAM type: YTN; PAM sequence: TTT
  source 1..20: mol_type = other DNA
tgtttgtttgttttttttaa

SEQ ID NO: 36189 - DNA, 20 bp, synthetic construct
  misc_feature 1..20: note = Description of Artificial Sequence: Synthetic oligonucleotide
  misc_feature 1..20: note = Target: FXN; (+) strand; PAM type: YTN; PAM sequence: TTT
  source 1..20: mol_type = other DNA
gtttgtttgttttttttaat

SEQ ID NO: 36190 - DNA, 20 bp, synthetic construct
  misc_feature 1..20: note = Description of Artificial Sequence: Synthetic oligonucleotide
  misc_feature 1..20: note = Target: FXN; (+) strand; PAM type: YTN; PAM sequence: TTG
  source 1..20: mol_type = other DNA
tttgtttgttttttttaatt

SEQ ID NO: 36191 - DNA, 20 bp, synthetic construct
  misc_feature 1..20: note = Description of Artificial Sequence: Synthetic oligonucleotide
  misc_feature 1..20: note = Target: FXN; (+) strand; PAM type: YTN; PAM sequence: TTT
  source 1..20: mol_type = other DNA
gtttgttttttttaatttga

SEQ ID NO: 36192 - DNA, 20 bp, synthetic construct
  misc_feature 1..20: note = Description of Artificial Sequence: Synthetic oligonucleotide
  misc_feature 1..20: note = Target: FXN; (+) strand; PAM type: YTN; PAM sequence: TTG
  source 1..20: mol_type = other DNA
tttgttttttttaatttgac

SEQ ID NO: 36193 - DNA, 20 bp, synthetic construct
  misc_feature 1..20: note = Description of Artificial Sequence: Synthetic oligonucleotide
  misc_feature 1..20: note = Target: FXN; (+) strand; PAM type: YTN; PAM sequence: TTT
  source 1..20: mol_type = other DNA
gttttttttaatttgacaag

SEQ ID NO: 36194 - DNA, 20 bp, synthetic construct
  misc_feature 1..20: note = Description of Artificial Sequence: Synthetic oligonucleotide
  misc_feature 1..20: note = Target: FXN; (+) strand; PAM type: YTN; PAM sequence: TTG
  source 1..20: mol_type = other DNA
ttttttttaatttgacaagt

SEQ ID NO: 36195 - DNA, 20 bp, synthetic construct
  misc_feature 1..20: note = Description of Artificial Sequence: Synthetic oligonucleotide
  misc_feature 1..20: note = Target: FXN; (+) strand; PAM type: YTN; PAM sequence: TTT
  source 1..20: mol_type = other DNA
tttttaatttgacaagtttt

SEQ ID NO: 36196 - DNA, 20 bp, synthetic construct
  misc_feature 1..20: note = Description of Artificial Sequence: Synthetic oligonucleotide
  misc_feature 1..20: note = Target: FXN; (+) strand; PAM type: YTN; PAM sequence: TTT
  source 1..20: mol_type = other DNA
ttttaatttgacaagttttc

SEQ ID NO: 36197 - DNA, 20 bp, synthetic construct
  misc_feature 1..20: note = Description of Artificial Sequence: Synthetic oligonucleotide
  misc_feature 1..20: note = Target: FXN; (+) strand; PAM type: YTN; PAM sequence: TTT
  source 1..20: mol_type = other DNA
tttaatttgacaagttttca

SEQ ID NO: 36198 - DNA, 20 bp, synthetic construct
  misc_feature 1..20: note = Description of Artificial Sequence: Synthetic oligonucleotide
  misc_feature 1..20: note = Target: FXN; (+) strand; PAM type: YTN; PAM sequence: TTT
  source 1..20: mol_type = other DNA
ttaatttgacaagttttcag

SEQ ID NO: 36199 - DNA, 20 bp, synthetic construct
  misc_feature 1..20: note = Description of Artificial Sequence: Synthetic oligonucleotide
  misc_feature 1..20: note = Target: FXN; (+) strand; PAM type: YTN; PAM sequence: TTT
  source 1..20: mol_type = other DNA
taatttgacaagttttcagg

SEQ ID NO: 36200 - DNA, 20 bp, synthetic construct
  misc_feature 1..20: note = Description of Artificial Sequence: Synthetic oligonucleotide
  misc_feature 1..20: note = Target: FXN; (+) strand; PAM type: YTN; PAM sequence: TTT
  source 1..20: mol_type = other DNA
aatttgacaagttttcaggt

SEQ ID NO: 36201 - DNA, 20 bp, synthetic construct
  misc_feature 1..20: note = Description of Artificial Sequence: Synthetic oligonucleotide
  misc_feature 1..20: note = Target: FXN; (+) strand; PAM type: YTN; PAM sequence: TTA
  source 1..20: mol_type = other DNA
atttgacaagttttcaggtc

SEQ ID NO: 36202 - DNA, 20 bp, synthetic construct
  misc_feature 1..20: note = Description of Artificial Sequence: Synthetic oligonucleotide
  misc_feature 1..20: note = Target: FXN; (+) strand; PAM type: YTN; PAM sequence: TTT
  source 1..20: mol_type = other DNA
gacaagttttcaggtcctgt

SEQ ID NO: 36203 - DNA, 20 bp, synthetic construct
  misc_feature 1..20: note = Description of Artificial Sequence: Synthetic oligonucleotide
  misc_feature 1..20: note = Target: FXN; (+) strand; PAM type: YTN; PAM sequence: TTG
  source 1..20: mol_type = other DNA
acaagttttcaggtcctgtg

SEQ ID NO: 36204 - DNA, 20 bp, synthetic construct
  misc_feature 1..20: note = Description of Artificial Sequence: Synthetic oligonucleotide
  misc_feature 1..20: note = Target: FXN; (+) strand; PAM type: YTN; PAM sequence: TTT
  source 1..20: mol_type = other DNA
tcaggtcctgtgaaatcagc

SEQ ID NO: 36205 - DNA, 20 bp, synthetic construct
  misc_feature 1..20: note = Description of Artificial Sequence: Synthetic oligonucleotide
  misc_feature 1..20: note = Target: FXN; (+) strand; PAM type: YTN; PAM sequence: TTT
  source 1..20: mol_type = other DNA
caggtcctgtgaaatcagca

SEQ ID NO: 36206 - DNA, 20 bp, synthetic construct
  misc_feature 1..20: note = Description of Artificial Sequence: Synthetic oligonucleotide
  misc_feature 1..20: note = Target: FXN; (+) strand; PAM type: YTN; PAM sequence: TTC
  source 1..20: mol_type = other DNA
aggtcctgtgaaatcagcag

SEQ ID NO: 36207 - DNA, 20 bp, synthetic construct
  misc_feature 1..20: note = Description of Artificial Sequence: Synthetic oligonucleotide
  misc_feature 1..20: note = Target: FXN; (+) strand; PAM type: YTN; PAM sequence: CTG
  source 1..20: mol_type = other DNA
tgaaatcagcagtcttacct

SEQ ID NO: 36208 - DNA, 20 bp, synthetic construct
  misc_feature 1..20: note = Description of Artificial Sequence: Synthetic oligonucleotide
  misc_feature 1..20: note = Target: FXN; (+) strand; PAM type: YTN; PAM sequence: CTT
  source 1..20: mol_type = other DNA
acctcccaccttgcgcaccc

SEQ ID NO: 36209 - DNA, 20 bp, synthetic construct
  misc_feature 1..20: note = Description of Artificial Sequence: Synthetic oligonucleotide
  misc_feature 1..20: note = Target: FXN; (+) strand; PAM type: YTN; PAM sequence: TTA
  source 1..20: mol_type = other DNA
cctcccaccttgcgcaccct

SEQ ID NO: 36210 - DNA, 20 bp, synthetic construct
  misc_feature 1..20: note = Description of Artificial Sequence: Synthetic oligonucleotide
  misc_feature 1..20: note = Target: FXN; (+) strand; PAM type: YTN; PAM sequence: CTC
  source 1..20: mol_type = other DNA
ccaccttgcgcaccctgagg

SEQ ID NO: 36211 - DNA, 20 bp, synthetic construct
  misc_feature 1..20: note = Description of Artificial Sequence: Synthetic oligonucleotide
  misc_feature 1..20: note = Target: FXN; (+) strand; PAM type: YTN; PAM sequence: CTT
  source 1..20: mol_type = other DNA
gcgcaccctgaggaggttgc

SEQ ID NO: 36212 - DNA, 20 bp, synthetic construct
  misc_feature 1..20: note = Description of Artificial Sequence: Synthetic oligonucleotide
  misc_feature 1..20: note = Target: FXN; (+) strand; PAM type: YTN; PAM sequence: TTG
  source 1..20: mol_type = other DNA
cgcaccctgaggaggttgca

SEQ ID NO: 36213 - DNA, 20 bp, synthetic construct
  misc_feature 1..20: note = Description of Artificial Sequence: Synthetic oligonucleotide
  misc_feature 1..20: note = Target: FXN; (+) strand; PAM type: YTN; PAM sequence: CTG
  source 1..20: mol_type = other DNA
aggaggttgcagaataaagg

SEQ ID NO: 36214 - DNA, 20 bp, synthetic construct
  misc_feature 1..20: note = Description of Artificial Sequence: Synthetic oligonucleotide
  misc_feature 1..20: note = Target: FXN; (+) strand; PAM type: YTN; PAM sequence: TTG
  source 1..20: mol_type = other DNA
cagaataaaggagaattcta

SEQ ID NO: 36215 - DNA, 20 bp, synthetic construct
  misc_feature 1..20: note = Description of Artificial Sequence: Synthetic oligonucleotide
  misc_feature 1..20: note = Target: FXN; (+) strand; PAM type: YTN; PAM sequence: TTC
  source 1..20: mol_type = other DNA
tagggacacgtgggcatcag

SEQ ID NO: 36216 - DNA, 20 bp, synthetic construct
  misc_feature 1..20: note = Description of Artificial Sequence: Synthetic oligonucleotide
  misc_feature 1..20: note = Target: FXN; (+) strand; PAM type: YTN; PAM sequence: CTA
  source 1..20: mol_type = other DNA
gggacacgtgggcatcagtg

SEQ ID NO: 36217 - DNA, 20 bp, synthetic construct
  misc_feature 1..20: note = Description of Artificial Sequence: Synthetic oligonucleotide
  misc_feature 1..20: note = Target: FXN; (+) strand; PAM type: YTN; PAM sequence: CTG
  source 1..20: mol_type = other DNA
tgctcagagcacctcaggca

SEQ ID NO: 36218 - DNA, 20 bp, synthetic construct
  misc_feature 1..20: note = Description of Artificial Sequence: Synthetic oligonucleotide
  misc_feature 1..20: note = Target: FXN; (+) strand; PAM type: YTN; PAM sequence: CTC
  source 1..20: mol_type = other DNA
agagcacctcaggcagtgtg

SEQ ID NO: 36219 - DNA, 20 bp, synthetic construct
  misc_feature 1..20: note = Description of Artificial Sequence: Synthetic oligonucleotide
  misc_feature 1..20: note = Target: FXN; (+) strand; PAM type: YTN; PAM sequence: CTC
  source 1..20: mol_type = other DNA
aggcagtgtggaggggtcta

SEQ ID NO: 36220 - DNA, 20 bp, synthetic construct
  misc_feature 1..20: note = Description of Artificial Sequence: Synthetic oligonucleotide
  misc_feature 1..20: note = Target: FXN; (+) strand; PAM type: YTN; PAM sequence: CTA
  source 1..20: mol_type = other DNA
gaggttactcaggctctgcc

SEQ ID NO: 36221 - DNA, 20 bp, synthetic construct
  misc_feature 1..20: note = Description of Artificial Sequence: Synthetic oligonucleotide
  misc_feature 1..20: note = Target: FXN; (+) strand; PAM type: YTN; PAM sequence: TTA
  source 1..20: mol_type = other DNA
ctcaggctctgcctggcaac

SEQ ID NO: 36222 - DNA, 20 bp, synthetic construct
  misc_feature 1..20: note = Description of Artificial Sequence: Synthetic oligonucleotide
  misc_feature 1..20: note = Target: FXN; (+) strand; PAM type: YTN; PAM sequence: CTC
  source 1..20: mol_type = other DNA
aggctctgcctggcaacccg

SEQ ID NO: 36223 - DNA, 20 bp, synthetic construct
  misc_feature 1..20: note = Description of Artificial Sequence: Synthetic oligonucleotide
  misc_feature 1..20: note = Target: FXN; (+) strand; PAM type: YTN; PAM sequence: CTC
  source 1..20: mol_type = other DNA
tgcctggcaacccgatagca

SEQ ID NO: 36224 - DNA, 20 bp, synthetic construct
  misc_feature 1..20: note = Description of Artificial Sequence: Synthetic oligonucleotide
  misc_feature 1..20: note = Target: FXN; (+) strand; PAM type: YTN; PAM sequence: CTG
  source 1..20: mol_type = other DNA
cctggcaacccgatagcagt

SEQ ID NO: 36225 - DNA, 20 bp, synthetic construct
  misc_feature 1..20: note = Description of Artificial Sequence: Synthetic oligonucleotide
  misc_feature 1..20: note = Target: FXN; (+) strand; PAM type: YTN; PAM sequence: CTG
  source 1..20: mol_type = other DNA
gcaacccgatagcagtatca

SEQ ID NO: 36226 - DNA, 20 bp, synthetic construct
  misc_feature 1..20: note = Description of Artificial Sequence: Synthetic oligonucleotide
  misc_feature 1..20: note = Target: FXN; (+) strand; PAM type: YTN; PAM sequence: CTT
  source 1..20: mol_type = other DNA
gggcttggtgtggtttatta

SEQ ID NO: 36227 - DNA, 20 bp, synthetic construct
  misc_feature 1..20: note = Description of Artificial Sequence: Synthetic oligonucleotide
  misc_feature 1..20: note = Target: FXN; (+) strand; PAM type: YTN; PAM sequence: TTG
  source 1..20: mol_type = other DNA
ggcttggtgtggtttattag

SEQ ID NO: 36228 - DNA, 20 bp, synthetic construct
  misc_feature 1..20: note = Description of Artificial Sequence: Synthetic oligonucleotide
  misc_feature 1..20: note = Target: FXN; (+) strand; PAM type: YTN; PAM sequence: CTT
  source 1..20: mol_type = other DNA
ggtgtggtttattagtcctt

SEQ ID NO: 36229 - DNA, 20 bp, synthetic construct
  misc_feature 1..20: note = Description of Artificial Sequence: Synthetic oligonucleotide
  misc_feature 1..20: note = Target: FXN; (+) strand; PAM type: YTN; PAM sequence: TTG
  source 1..20: mol_type = other DNA
gtgtggtttattagtccttt

SEQ ID NO: 36230 - DNA, 20 bp, synthetic construct
  misc_feature 1..20: note = Description of Artificial Sequence: Synthetic oligonucleotide
  misc_feature 1..20: note = Target: FXN; (+) strand; PAM type: YTN; PAM sequence: TTT
  source 1..20: mol_type = other DNA
attagtccttttcctgtgac

SEQ ID NO: 36231 - DNA, 20 bp, synthetic construct
  misc_feature 1..20: note = Description of Artificial Sequence: Synthetic oligonucleotide
  misc_feature 1..20: note = Target: FXN; (+) strand; PAM type: YTN; PAM sequence: TTA
  source 1..20: mol_type = other DNA
ttagtccttttcctgtgacc

SEQ ID NO: 36232 - DNA, 20 bp, synthetic construct
  misc_feature 1..20: note = Description of Artificial Sequence: Synthetic oligonucleotide
  misc_feature 1..20: note = Target: FXN; (+) strand; PAM type: YTN; PAM sequence: TTA
  source 1..20: mol_type = other DNA
gtccttttcctgtgaccctg

SEQ ID NO: 36233 - DNA, 20 bp, synthetic construct
  misc_feature 1..20: note = Description of Artificial Sequence: Synthetic oligonucleotide
  misc_feature 1..20: note = Target: FXN; (+) strand; PAM type: YTN; PAM sequence: CTT
  source 1..20: mol_type = other DNA
ttcctgtgaccctgatggtt

SEQ ID NO: 36234 - DNA, 20 bp, synthetic construct
  misc_feature 1..20: note = Description of Artificial Sequence: Synthetic oligonucleotide
  misc_feature 1..20: note = Target: FXN; (+) strand; PAM type: YTN; PAM sequence: TTT
  source 1..20: mol_type = other DNA
tcctgtgaccctgatggttt

SEQ ID NO: 36235 - DNA, 20 bp, synthetic construct
  misc_feature 1..20: note = Description of Artificial Sequence: Synthetic oligonucleotide
  misc_feature 1..20: note = Target: FXN; (+) strand; PAM type: YTN; PAM sequence: TTT
  source 1..20: mol_type = other DNA
cctgtgaccctgatggtttg

SEQ ID NO: 36236 - DNA, 20 bp, synthetic construct
  misc_feature 1..20: note = Description of Artificial Sequence: Synthetic oligonucleotide
  misc_feature 1..20: note = Target: FXN; (+) strand; PAM type: YTN; PAM sequence: TTC
  source 1..20: mol_type = other DNA
ctgtgaccctgatggtttgg

SEQ ID NO: 36237 - DNA, 20 bp, synthetic construct
  misc_feature 1..20: note = Description of Artificial Sequence: Synthetic oligonucleotide
  misc_feature 1..20: note = Target: FXN; (+) strand; PAM type: YTN; PAM sequence: CTG
  source 1..20: mol_type = other DNA
tgaccctgatggtttggttc

SEQ ID NO: 36238 - DNA, 20 bp, synthetic construct
  misc_feature 1..20: note = Description of Artificial Sequence: Synthetic oligonucleotide
  misc_feature 1..20: note = Target: FXN; (+) strand; PAM type: YTN; PAM sequence: CTG
  source 1..20: mol_type = other DNA
atggtttggttcactcattt

SEQ ID NO: 36239 - DNA, 20 bp, synthetic construct
  misc_feature 1..20: note = Description of Artificial Sequence: Synthetic oligonucleotide
  misc_feature 1..20: note = Target: FXN; (+) strand; PAM type: YTN; PAM sequence: TTT
  source 1..20: mol_type = other DNA
ggttcactcatttttatctc

SEQ ID NO: 36240 - DNA, 20 bp, synthetic construct
  misc_feature 1..20: note = Description of Artificial Sequence: Synthetic oligonucleotide
  misc_feature 1..20: note = Target: FXN; (+) strand; PAM type: YTN; PAM sequence: TTG
  source 1..20: mol_type = other DNA
gttcactcatttttatctcc

SEQ ID NO: 36241 - DNA, 20 bp, synthetic construct
  misc_feature 1..20: note = Description of Artificial Sequence: Synthetic oligonucleotide
  misc_feature 1..20: note = Target: FXN; (+) strand; PAM type: YTN; PAM sequence: TTC
  source 1..20: mol_type = other DNA
actcatttttatctccatac

SEQ ID NO: 36242 - DNA, 20 bp, synthetic construct
  misc_feature 1..20: note = Description of Artificial Sequence: Synthetic oligonucleotide
  misc_feature 1..20: note = Target: FXN; (+) strand; PAM type: YTN; PAM sequence: CTC
  source 1..20: mol_type = other DNA
atttttatctccatactggg

SEQ ID NO: 36243 - DNA, 20 bp, synthetic construct
  misc_feature 1..20: note = Description of Artificial Sequence: Synthetic oligonucleotide
  misc_feature 1..20: note = Target: FXN; (+) strand; PAM type: YTN; PAM sequence: TTT
  source 1..20: mol_type = other DNA
ttatctccatactgggaaca

SEQ ID NO: 36244 - DNA, 20 bp, synthetic construct
  misc_feature 1..20: note = Description of Artificial Sequence: Synthetic oligonucleotide
  misc_feature 1..20: note = Target: FXN; (+) strand; PAM type: YTN; PAM sequence: TTT
  source 1..20: mol_type = other DNA
tatctccatactgggaacag

SEQ ID NO: 36245 - DNA, 20 bp, synthetic construct
  misc_feature 1..20: note = Description of Artificial Sequence: Synthetic oligonucleotide
  misc_feature 1..20: note = Target: FXN; (+) strand; PAM type: YTN; PAM sequence: TTT
  source 1..20: mol_type = other DNA
atctccatactgggaacagg

SEQ ID NO: 36246 - DNA, 20 bp, synthetic construct
  misc_feature 1..20: note = Description of Artificial Sequence: Synthetic oligonucleotide
  misc_feature 1..20: note = Target: FXN; (+) strand; PAM type: YTN; PAM sequence: TTA
  source 1..20: mol_type = other DNA
tctccatactgggaacaggt

SEQ ID NO: 36247 - DNA, 20 bp, synthetic construct
  misc_feature 1..20: note = Description of Artificial Sequence: Synthetic oligonucleotide
  misc_feature 1..20: note = Target: FXN; (+) strand; PAM type: YTN; PAM sequence: CTC
  source 1..20: mol_type = other DNA
catactgggaacaggttcaa

SEQ ID NO: 36248 - DNA, 20 bp, synthetic construct
  misc_feature 1..20: note = Description of Artificial Sequence: Synthetic oligonucleotide
  misc_feature 1..20: note = Target: FXN; (+) strand; PAM type: YTN; PAM sequence: CTG
  source 1..20: mol_type = other DNA
ggaacaggttcaagccccag

SEQ ID NO: 36249 - DNA, 20 bp, synthetic construct
  misc_feature 1..20: note = Description of Artificial Sequence: Synthetic oligonucleotide
  misc_feature 1..20: note = Target: FXN; (+) strand; PAM type: YTN; PAM sequence: TTC
  source 1..20: mol_type = other DNA
aagccccagcatttggttga

SEQ ID NO: 36250 - DNA, 20 bp, synthetic construct
  misc_feature 1..20: note = Description of Artificial Sequence: Synthetic oligonucleotide
  misc_feature 1..20: note = Target: FXN; (+) strand; PAM type: YTN; PAM sequence: TTT
  source 1..20: mol_type = other DNA
ggttgataatgcaggaatcc

SEQ ID NO: 36251 - DNA, 20 bp, synthetic construct
  misc_feature 1..20: note = Description of Artificial Sequence: Synthetic oligonucleotide
  misc_feature 1..20: note = Target: FXN; (+) strand; PAM type: YTN; PAM sequence: TTG
  source 1..20: mol_type = other DNA
gttgataatgcaggaatcct

SEQ ID NO: 36252 - DNA, 20 bp, synthetic construct
  misc_feature 1..20: note = Description of Artificial Sequence: Synthetic oligonucleotide
  misc_feature 1..20: note = Target: FXN; (+) strand; PAM type: YTN; PAM sequence: TTG
  source 1..20: mol_type = other DNA
ataatgcaggaatccttgat

SEQ ID NO: 36253 - DNA, 20 bp, synthetic construct
  misc_feature 1..20: note = Description of Artificial Sequence: Synthetic oligonucleotide
  misc_feature 1..20: note = Target: FXN; (+) strand; PAM type: YTN; PAM sequence: CTT
  source 1..20: mol_type = other DNA
gatacttttattgcccaagc

SEQ ID NO: 36254 - DNA, 20 bp, synthetic construct
  misc_feature 1..20: note = Description of Artificial Sequence: Synthetic oligonucleotide
  misc_feature 1..20: note = Target: FXN; (+) strand; PAM type: YTN; PAM sequence: TTG
  source 1..20: mol_type = other DNA
atacttttattgcccaagct

SEQ ID NO: 36255 - DNA, 20 bp, synthetic construct
  misc_feature 1..20: note = Description of Artificial Sequence: Synthetic oligonucleotide
  misc_feature 1..20: note = Target: FXN; (+) strand; PAM type: YTN; PAM sequence: CTT
  source 1..20: mol_type = other DNA
ttattgcccaagcttccctt

SEQ ID NO: 36256 - DNA, 20 bp, synthetic construct
  misc_feature 1..20: note = Description of Artificial Sequence: Synthetic oligonucleotide
  misc_feature 1..20: note = Target: FXN; (+) strand; PAM type: YTN; PAM sequence: TTT
  source 1..20: mol_type = other DNA
tattgcccaagcttcccttc

SEQ ID NO: 36257 - DNA, 20 bp, synthetic construct
  misc_feature 1..20: note = Description of Artificial Sequence: Synthetic oligonucleotide
  misc_feature 1..20: note = Target: FXN; (+) strand; PAM type: YTN; PAM sequence: TTT
  source 1..20: mol_type = other DNA
attgcccaagcttcccttcc

SEQ ID NO: 36258 - DNA, 20 bp, synthetic construct
  misc_feature 1..20: note = Description of Artificial Sequence: Synthetic oligonucleotide
  misc_feature 1..20: note = Target: FXN; (+) strand; PAM type: YTN; PAM sequence: TTA
  source 1..20: mol_type = other DNA
ttgcccaagcttcccttcct

SEQ ID NO: 36259 - DNA, 20 bp, synthetic construct
  misc_feature 1..20: note = Description of Artificial Sequence: Synthetic oligonucleotide
  misc_feature 1..20: note = Target: FXN; (+) strand; PAM type: YTN; PAM sequence: TTG
  source 1..20: mol_type = other DNA
cccaagcttcccttcctggt

SEQ ID NO: 36260 - DNA, 20 bp, synthetic construct
  misc_feature 1..20: note = Description of Artificial Sequence: Synthetic oligonucleotide
  misc_feature 1..20: note = Target: FXN; (+) strand; PAM type: YTN; PAM sequence: CTT
  source 1..20: mol_type = other DNA
cccttcctggtgacctcatc

SEQ ID NO: 36261 - DNA, 20 bp, synthetic construct
  misc_feature 1..20: note = Description of Artificial Sequence: Synthetic oligonucleotide
  misc_feature 1..20: note = Target: FXN; (+) strand; PAM type: YTN; PAM sequence: TTC
  source 1..20: mol_type = other DNA
ccttcctggtgacctcatcc

SEQ ID NO: 36262 - DNA, 20 bp, synthetic construct
  misc_feature 1..20: note = Description of Artificial Sequence: Synthetic oligonucleotide
  misc_feature 1..20: note = Target: FXN; (+) strand; PAM type: YTN; PAM sequence: CTT
  source 1..20: mol_type = other DNA
cctggtgacctcatcctagc

SEQ ID NO: 36263 - DNA, 20 bp, synthetic construct
  misc_feature 1..20: note = Description of Artificial Sequence: Synthetic oligonucleotide
  misc_feature 1..20: note = Target: FXN; (+) strand; PAM type: YTN; PAM sequence: TTC
  source 1..20: mol_type = other DNA
ctggtgacctcatcctagcc

SEQ ID NO: 36264 - DNA, 20 bp, synthetic construct
  misc_feature 1..20: note = Description of Artificial Sequence: Synthetic oligonucleotide
  misc_feature 1..20: note = Target: FXN; (+) strand; PAM type: YTN; PAM sequence: CTG
  source 1..20: mol_type = other DNA
gtgacctcatcctagcctca

SEQ ID NO: 36265 - DNA, 20 bp, synthetic construct
  misc_feature 1..20: note = Description of Artificial Sequence: Synthetic oligonucleotide
  misc_feature 1..20: note = Target: FXN; (+) strand; PAM type: YTN; PAM sequence: CTC
  source 1..20: mol_type = other DNA
atcctagcctcagtctttgg

SEQ ID NO: 36266 - DNA, 20 bp, synthetic construct
  misc_feature 1..20: note = Description of Artificial Sequence: Synthetic oligonucleotide
  misc_feature 1..20: note = Target: FXN; (+) strand; PAM type: YTN; PAM sequence: CTA
  source 1..20: mol_type = other DNA
gcctcagtctttggaaaagc

SEQ ID NO: 36267 - DNA, 20 bp, synthetic construct
  misc_feature 1..20: note = Description of Artificial Sequence: Synthetic oligonucleotide
  misc_feature 1..20: note = Target: FXN; (+) strand; PAM type: YTN; PAM sequence: CTC
  source 1..20: mol_type = other DNA
agtctttggaaaagccctcc

SEQ ID NO: 36268 - DNA, 20 bp, synthetic construct
  misc_feature 1..20: note = Description of Artificial Sequence: Synthetic oligonucleotide
  misc_feature 1..20: note = Target: FXN; (+) strand; PAM type: YTN; PAM sequence: CTT
  source 1..20: mol_type = other DNA
tggaaaagccctccttgagt

SEQ ID NO: 36269 - DNA, 20 bp, synthetic construct
  misc_feature 1..20: note = Description of Artificial Sequence: Synthetic oligonucleotide
  misc_feature 1..20: note = Target: FXN; (+) strand; PAM type: YTN; PAM sequence: TTT
  source 1..20: mol_type = other DNA
ggaaaagccctccttgagtg

SEQ ID NO: 36270 - DNA, 20 bp, synthetic construct
  misc_feature 1..20: note = Description of Artificial Sequence: Synthetic oligonucleotide
  misc_feature 1..20: note = Target: FXN; (+) strand; PAM type: YTN; PAM sequence: TTG
  source 1..20: mol_type = other DNA
gaaaagccctccttgagtgc

SEQ ID NO: 36271 - DNA, 20 bp, synthetic construct
  misc_feature 1..20: note = Description of Artificial Sequence: Synthetic oligonucleotide
  misc_feature 1..20: note = Target: FXN; (+) strand; PAM type: YTN; PAM sequence: CTC
  source 1..20: mol_type = other DNA
cttgagtgctcaggcagact

SEQ ID NO: 36272 - DNA, 20 bp, synthetic construct
  misc_feature 1..20: note = Description of Artificial Sequence: Synthetic oligonucleotide
  misc_feature 1..20: note = Target: FXN; (+) strand; PAM type: YTN; PAM sequence: CTT
  source 1..20: mol_type = other DNA
gagtgctcaggcagactcag

SEQ ID NO: 36273 - DNA, 20 bp, synthetic construct
  misc_feature 1..20: note = Description of Artificial Sequence: Synthetic oligonucleotide
  misc_feature 1..20: note = Target: FXN; (+) strand; PAM type: YTN; PAM sequence: TTG
  source 1..20: mol_type = other DNA
agtgctcaggcagactcagg

SEQ ID NO: 36274 - DNA, 20 bp, synthetic construct
  misc_feature 1..20: note = Description of Artificial Sequence: Synthetic oligonucleotide
  misc_feature 1..20: note = Target: FXN; (+) strand; PAM type: YTN; PAM sequence: CTC
  source 1..20: mol_type = other DNA
aggcagactcaggtgccctt

SEQ ID NO: 36275 - DNA, 20 bp, synthetic construct
  misc_feature 1..20: note = Description of Artificial Sequence: Synthetic oligonucleotide
  misc_feature 1..20: note = Target: FXN; (+) strand; PAM type: YTN; PAM sequence: CTC
  source 1..20: mol_type = other DNA
aggtgccctttcttctgggc

SEQ ID NO: 36276 - DNA, 20 bp, synthetic construct
  misc_feature 1..20: note = Description of Artificial Sequence: Synthetic oligonucleotide
  misc_feature 1..20: note = Target: FXN; (+) strand; PAM type: YTN; PAM sequence: CTT
  source 1..20: mol_type = other DNA
tcttctgggctcccatgcac

SEQ ID NO: 36277 - DNA, 20 bp, synthetic construct
  misc_feature 1..20: note = Description of Artificial Sequence: Synthetic oligonucleotide
  misc_feature 1..20: note = Target: FXN; (+) strand; PAM type: YTN; PAM sequence: TTT
  source 1..20: mol_type = other DNA
cttctgggctcccatgcact

SEQ ID NO: 36278 - DNA, 20 bp, synthetic construct
  misc_feature 1..20: note = Description of Artificial Sequence: Synthetic oligonucleotide
  misc_feature 1..20: note = Target: FXN; (+) strand; PAM type: YTN; PAM sequence: TTC
  source 1..20: mol_type = other DNA
ttctgggctcccatgcactc

SEQ ID NO: 36279 - DNA, 20 bp, synthetic construct
  misc_feature 1..20: note = Description of Artificial Sequence: Synthetic oligonucleotide
  misc_feature 1..20: note = Target: FXN; (+) strand; PAM type: YTN; PAM sequence: CTT
  source 1..20: mol_type = other DNA
ctgggctcccatgcactctg

SEQ ID NO: 36280 - DNA, 20 bp, synthetic construct
  misc_feature 1..20: note = Description of Artificial Sequence: Synthetic oligonucleotide
  misc_feature 1..20: note = Target: FXN; (+) strand; PAM type: YTN; PAM sequence: TTC
  source 1..20: mol_type = other DNA
tgggctcccatgcactctgt

SEQ ID NO: 36281 - DNA, 20 bp, synthetic construct
  misc_feature 1..20: note = Description of Artificial Sequence: Synthetic oligonucleotide
  misc_feature 1..20: note = Target: FXN; (+) strand; PAM type: YTN; PAM sequence: CTG
  source 1..20: mol_type = other DNA
ggctcccatgcactctgttc

SEQ ID NO: 36282 - DNA, 20 bp, synthetic construct
  misc_feature 1..20: note = Description of Artificial Sequence: Synthetic oligonucleotide
  misc_feature 1..20: note = Target: FXN; (+) strand; PAM type: YTN; PAM sequence: CTC
  source 1..20: mol_type = other DNA
ccatgcactctgttcttacc

SEQ ID NO: 36283 - DNA, 20 bp, synthetic construct
  misc_feature 1..20: note = Description of Artificial Sequence: Synthetic oligonucleotide
  misc_feature 1..20: note = Target: FXN; (+) strand; PAM type: YTN; PAM sequence: CTC
  source 1..20: mol_type = other DNA
tgttcttacctccatcaggg

SEQ ID NO: 36284 - DNA, 20 bp, synthetic construct
  misc_feature 1..20: note = Description of Artificial Sequence: Synthetic oligonucleotide
  misc_feature 1..20: note = Target: FXN; (+) strand; PAM type: YTN; PAM sequence: CTG
  source 1..20: mol_type = other DNA
ttcttacctccatcagggtg

SEQ ID NO: 36285 - DNA, 20 bp, synthetic construct
  misc_feature 1..20: note = Description of Artificial Sequence: Synthetic oligonucleotide
  misc_feature 1..20: note = Target: FXN; (+) strand; PAM type: YTN; PAM sequence: TTC
  source 1..20: mol_type = other DNA
ttacctccatcagggtgcca

SEQ ID NO: 36286 - DNA, 20 bp, synthetic construct
  misc_feature 1..20: note = Description of Artificial Sequence: Synthetic oligonucleotide
  misc_feature 1..20: note = Target: FXN; (+) strand; PAM type: YTN; PAM sequence: CTT
  source 1..20: mol_type = other DNA
acctccatcagggtgccaca

SEQ ID NO: 36287 - DNA, 20 bp, synthetic construct
  misc_feature 1..20: note = Description of Artificial Sequence: Synthetic oligonucleotide
  misc_feature 1..20: note = Target: FXN; (+) strand; PAM type: YTN; PAM sequence: TTA
  source 1..20: mol_type = other DNA
cctccatcagggtgccacat

SEQ ID NO: 36288 - DNA, 20 bp, synthetic construct
  misc_feature 1..20: note = Description of Artificial Sequence: Synthetic oligonucleotide
  misc_feature 1..20: note = Target: FXN; (+) strand; PAM type: YTN; PAM sequence: CTC
  source 1..20: mol_type = other DNA
catcagggtgccacatgcac

SEQ ID NO: 36289 - DNA, 20 bp, synthetic construct
  misc_feature 1..20: note = Description of Artificial Sequence: Synthetic oligonucleotide
  misc_feature 1..20: note = Target: FXN; (+) strand; PAM type: YTN; PAM sequence: CTA
  source 1..20: mol_type = other DNA
gtgttatctgctgccgtggc

SEQ ID NO: 36290 - DNA, 20 bp, synthetic construct
  misc_feature 1..20: note = Description of Artificial Sequence: Synthetic oligonucleotide
  misc_feature 1..20: note = Target: FXN; (+) strand; PAM type: YTN; PAM sequence: TTA
  source 1..20: mol_type = other DNA
tctgctgccgtggccaatca

SEQ ID NO: 36291 - DNA, 20 bp, synthetic construct
  misc_feature 1..20: note = Description of Artificial Sequence: Synthetic oligonucleotide
  misc_feature 1..20: note = Target: FXN; (+) strand; PAM type: YTN; PAM sequence: CTG
  source 1..20: mol_type = other DNA
ctgccgtggccaatcatcca

SEQ ID NO: 36292 - DNA, 20 bp, synthetic construct
  misc_feature 1..20: note = Description of Artificial Sequence: Synthetic oligonucleotide
  misc_feature 1..20: note = Target: FXN; (+) strand; PAM type: YTN; PAM sequence: CTG
  source 1..20: mol_type = other DNA
ccgtggccaatcatccatga

SEQ ID NO: 36293 - DNA, 20 bp, synthetic construct
  misc_feature 1..20: note = Description of Artificial Sequence: Synthetic oligonucleotide
  misc_feature 1..20: note = Target: FXN; (+) strand; PAM type: YTN; PAM sequence: CTG
  source 1..20: mol_type = other DNA
gtataagaagacatggcaga

SEQ ID NO: 36294 - DNA, 20 bp, synthetic construct
  misc_feature 1..20: note = Description of Artificial Sequence: Synthetic oligonucleotide
  misc_feature 1..20: note = Target: FXN; (+) strand; PAM type: YTN; PAM sequence: CTC
  source 1..20: mol_type = other DNA
cgatctgtccacacgaatac

SEQ ID NO: 36295 - DNA, 20 bp, synthetic construct
  misc_feature 1..20: note = Description of Artificial Sequence: Synthetic oligonucleotide
  misc_feature 1..20: note = Target: FXN; (+) strand; PAM type: YTN; PAM sequence: CTG
  source 1..20: mol_type = other DNA
tccacacgaatacagcattc

SEQ ID NO: 36296 - DNA, 20 bp, synthetic construct
  misc_feature 1..20: note = Description of Artificial Sequence: Synthetic oligonucleotide
  misc_feature 1..20: note = Target: FXN; (+) strand; PAM type: YTN; PAM sequence: TTC
  source 1..20: mol_type = other DNA
ccaaagcaacgtgcatgtgc

SEQ ID NO: 36297 - DNA, 20 bp, synthetic construct
  misc_feature 1..20: note = Description of Artificial Sequence: Synthetic oligonucleotide
  misc_feature 1..20: note = Target: FXN; (+) strand; PAM type: YTN; PAM sequence: TTA
  source 1..20: mol_type = other DNA
ttcactggatgagcttgagg

SEQ ID NO: 36298 - DNA, 20 bp, synthetic construct
  misc_feature 1..20: note = Description of Artificial Sequence: Synthetic oligonucleotide
  misc_feature 1..20: note = Target: FXN; (+) strand; PAM type: YTN; PAM sequence: TTC
  source 1..20: mol_type = other DNA
actggatgagcttgaggtgg

SEQ ID NO: 36299 - DNA, 20 bp, synthetic construct
  misc_feature 1..20: note = Description of Artificial Sequence: Synthetic oligonucleotide
  misc_feature 1..20: note = Target: FXN; (+) strand; PAM type: YTN; PAM sequence: CTG
  source 1..20: mol_type = other DNA
gatgagcttgaggtggatga

SEQ ID NO: 36300 - DNA, 20 bp, synthetic construct
  misc_feature 1..20: note = Description of Artificial Sequence: Synthetic oligonucleotide
  misc_feature 1..20: note = Target: FXN; (+) strand; PAM type: YTN; PAM sequence: CTT
  source 1..20: mol_type = other DNA
gaggtggatgaactagccca

SEQ ID NO: 36301 - DNA, 20 bp, synthetic construct
  misc_feature 1..20: note = Description of Artificial Sequence: Synthetic oligonucleotide
  misc_feature 1..20: note = Target: FXN; (+) strand; PAM type: YTN; PAM sequence: TTG
  source 1..20: mol_type = other DNA
aggtggatgaactagcccac

SEQ ID NO: 36302 - DNA, 20 bp, synthetic construct
  misc_feature 1..20: note = Description of Artificial Sequence: Synthetic oligonucleotide
  misc_feature 1..20: note = Target: FXN; (+) strand; PAM type: YTN; PAM sequence: CTA
  source 1..20: mol_type = other DNA
gcccaccaggctctcaatgt

SEQ ID NO: 36303 - DNA, 20 bp, synthetic construct
  misc_feature 1..20: note = Description of Artificial Sequence: Synthetic oligonucleotide
  misc_feature 1..20: note = Target: FXN; (+) strand; PAM type: YTN; PAM sequence: CTC
  source 1..20: mol_type = other DNA
tcaatgtcatgaatttaaca

SEQ ID NO: 36304 - DNA, 20 bp, synthetic construct
  misc_feature 1..20: note = Description of Artificial Sequence: Synthetic oligonucleotide
  misc_feature 1..20: note = Target: FXN; (+) strand; PAM type: YTN; PAM sequence: CTC
  source 1..20: mol_type = other DNA
aatgtcatgaatttaacact

SEQ ID NO: 36305 - DNA, 20 bp, synthetic construct
  misc_feature 1..20: note = Description of Artificial Sequence: Synthetic oligonucleotide
  misc_feature 1..20: note = Target: FXN; (+) strand; PAM type: YTN; PAM sequence: TTT
  source 1..20: mol_type = other DNA
aacactgaattaagaaaaat

SEQ ID NO: 36306 - DNA, 20 bp, synthetic construct
  misc_feature 1..20: note = Description of Artificial Sequence: Synthetic oligonucleotide
  misc_feature 1..20: note = Target: FXN; (+) strand; PAM type: YTN; PAM sequence: TTA
  source 1..20: mol_type = other DNA
acactgaattaagaaaaata

SEQ ID NO: 36307 - DNA, 20 bp, synthetic construct
  misc_feature 1..20: note = Description of Artificial Sequence: Synthetic oligonucleotide
  misc_feature 1..20: note = Target: FXN; (+) strand; PAM type: YTN; PAM sequence: CTG
  source 1..20: mol_type = other DNA
aattaagaaaaatatgtttt

SEQ ID NO: 36308 - DNA, 20 bp, synthetic construct
  misc_feature 1..20: note = Description of Artificial Sequence: Synthetic oligonucleotide
  misc_feature 1..20: note = Target: FXN; (+) strand; PAM type: YTN; PAM sequence: TTA
  source 1..20: mol_type = other DNA
agaaaaatatgttttaaaaa

SEQ ID NO: 36309 - DNA, 20 bp, synthetic construct
  misc_feature 1..20: note = Description of Artificial Sequence: Synthetic oligonucleotide
  misc_feature 1..20: note = Target: FXN; (+) strand; PAM type: YTN; PAM sequence: TTT
  source 1..20: mol_type = other DNA
taaaaataatagtttaggtg

SEQ ID NO: 36310 - DNA, 20 bp, synthetic construct
  misc_feature 1..20: note = Description of Artificial Sequence: Synthetic oligonucleotide
  misc_feature 1..20: note = Target: FXN; (+) strand; PAM type: YTN; PAM sequence: TTT
  source 1..20: mol_type = other DNA
aaaaataatagtttaggtga

SEQ ID NO: 36311 - DNA, 20 bp, synthetic construct
  misc_feature 1..20: note = Description of Artificial Sequence: Synthetic oligonucleotide
  misc_feature 1..20: note = Target: FXN; (+) strand; PAM type: YTN; PAM sequence: TTA
  source 1..20: mol_type = other DNA
aaaataatagtttaggtgat

SEQ ID NO: 36312 - DNA, 20 bp, synthetic construct
  misc_feature 1..20: note = Description of Artificial Sequence: Synthetic oligonucleotide
  misc_feature 1..20: note = Target: FXN; (+) strand; PAM type: YTN; PAM sequence: TTT
  source 1..20: mol_type = other DNA
aggtgattgctggggtgcta

SEQ ID NO: 36313 - DNA, 20 bp, synthetic construct
  misc_feature 1..20: note = Description of Artificial Sequence: Synthetic oligonucleotide
  misc_feature 1..20: note = Target: FXN; (+) strand; PAM type: YTN; PAM sequence: TTA
  source 1..20: mol_type = other DNA
ggtgattgctggggtgctag

SEQ ID NO: 36314 - DNA, 20 bp, synthetic construct
  misc_feature 1..20: note = Description of Artificial Sequence: Synthetic oligonucleotide
  misc_feature 1..20: note = Target: FXN; (+) strand; PAM type: YTN; PAM sequence: TTG
  source 1..20: mol_type = other DNA
ctggggtgctaggagaggaa

SEQ ID NO: 36315 - DNA, 20 bp, synthetic construct
  misc_feature 1..20: note = Description of Artificial Sequence: Synthetic oligonucleotide
  misc_feature 1..20: note = Target: FXN; (+) strand; PAM type: YTN; PAM sequence: CTG
  source 1..20: mol_type = other DNA
gggtgctaggagaggaagga

SEQ ID NO: 36316 - DNA, 20 bp, synthetic construct
  misc_feature 1..20: note = Description of Artificial Sequence: Synthetic oligonucleotide
  misc_feature 1..20: note = Target: FXN; (+) strand; PAM type: YTN; PAM sequence: CTA
  source 1..20: mol_type = other DNA
ggagaggaaggaatggggaa

SEQ ID NO: 36317 - DNA, 20 bp, synthetic construct
  misc_feature 1..20: note = Description of Artificial Sequence: Synthetic oligonucleotide
  misc_feature 1..20: note = Target: FXN; (+) strand; PAM type: YTN; PAM sequence: CTG
  source 1..20: mol_type = other DNA
tttaatgggtatagttggcc

SEQ ID NO: 36318 - DNA, 20 bp, synthetic construct
  misc_feature 1..20: note = Description of Artificial Sequence: Synthetic oligonucleotide
  misc_feature 1..20: note = Target: FXN; (+) strand; PAM type: YTN; PAM sequence: TTT
  source 1..20: mol_type = other DNA
aatgggtatagttggccttg

SEQ ID NO: 36319 - DNA, 20 bp, synthetic construct
  misc_feature 1..20: note = Description of Artificial Sequence: Synthetic oligonucleotide
  misc_feature 1..20: note = Target: FXN; (+) strand; PAM type: YTN; PAM sequence: TTA
  source 1..20: mol_type = other DNA
atgggtatagttggccttgt

SEQ ID NO: 36320 - DNA, 20 bp, synthetic construct
  misc_feature 1..20: note = Description of Artificial Sequence: Synthetic oligonucleotide
  misc_feature 1..20: note = Target: FXN; (+) strand; PAM type: YTN; PAM sequence: TTG
  source 1..20: mol_type = other DNA
gccttgtgtatctgtgggtt

SEQ ID NO: 36321 - DNA, 20 bp, synthetic construct
  misc_feature 1..20: note = Description of Artificial Sequence: Synthetic oligonucleotide
  misc_feature 1..20: note = Target: FXN; (+) strand; PAM type: YTN; PAM sequence: CTT
  source 1..20: mol_type = other DNA
gtgtatctgtgggttccaca

SEQ ID NO: 36322 - DNA, 20 bp, synthetic construct
  misc_feature 1..20: note = Description of Artificial Sequence: Synthetic oligonucleotide
  misc_feature 1..20: note = Target: FXN; (+) strand; PAM type: YTN; PAM sequence: TTG
  source 1..20: mol_type = other DNA
tgtatctgtgggttccacat

SEQ ID NO: 36323 - DNA, 20 bp, synthetic construct
  misc_feature 1..20: note = Description of Artificial Sequence: Synthetic oligonucleotide
  misc_feature 1..20: note = Target: FXN; (+) strand; PAM type: YTN; PAM sequence: CTG
  source 1..20: mol_type = other DNA
tgggttccacatctgattca

SEQ ID NO: 36324 - DNA, 20 bp, synthetic construct
  misc_feature 1..20: note = Description of Artificial Sequence: Synthetic oligonucleotide
  misc_feature 1..20: note = Target: FXN; (+) strand; PAM type: YTN; PAM sequence: TTC
  source 1..20: mol_type = other DNA
cacatctgattcaaccaacc

SEQ ID NO: 36325 - DNA, 20 bp, synthetic construct
  misc_feature 1..20: note = Description of Artificial Sequence: Synthetic oligonucleotide
  misc_feature 1..20: note = Target: FXN; (+) strand; PAM type: YTN; PAM sequence: CTG
  source 1..20: mol_type = other DNA
attcaaccaaccgtggatca

SEQ ID NO: 36326 - DNA, 20 bp, synthetic construct
  misc_feature 1..20: note = Description of Artificial Sequence: Synthetic oligonucleotide
  misc_feature 1..20: note = Target: FXN; (+) strand; PAM type: YTN; PAM sequence: TTC
  source 1..20: mol_type = other DNA
aaccaaccgtggatcaaaat

SEQ ID NO: 36327 - DNA, 20 bp, synthetic construct
  misc_feature 1..20: note = Description of Artificial Sequence: Synthetic oligonucleotide
  misc_feature 1..20: note = Target: FXN; (+) strand; PAM type: YTN; PAM sequence: TTT
  source 1..20: mol_type = other DNA
gaaaataaaaaacaaaacaa

SEQ ID NO: 36328 - DNA, 20 bp, synthetic construct
  misc_feature 1..20: note = Description of Artificial Sequence: Synthetic oligonucleotide
  misc_feature 1..20: note = Target: FXN; (+) strand; PAM type: YTN; PAM sequence: TTG
  source 1..20: mol_type = other DNA
aaaataaaaaacaaaacaaa

SEQ ID NO: 36329 - DNA, 20 bp, synthetic construct
  misc_feature 1..20: note = Description of Artificial Sequence: Synthetic oligonucleotide
  misc_feature 1..20: note = Target: FXN; (+) strand; PAM type: YTN; PAM sequence: CTA
  source 1..20: mol_type = other DNA
ttaacagcatttacattgta

SEQ ID NO: 36330 - DNA, 20 bp, synthetic construct
  misc_feature 1..20: note = Description of Artificial Sequence: Synthetic oligonucleotide
  misc_feature 1..20: note = Target: FXN; (+) strand; PAM type: YTN; PAM sequence: TTA
  source 1..20: mol_type = other DNA
acagcatttacattgtacta

SEQ ID NO: 36331 - DNA, 20 bp, synthetic construct
  misc_feature 1..20: note = Description of Artificial Sequence: Synthetic oligonucleotide
  misc_feature 1..20: note = Target: FXN; (+) strand; PAM type: YTN; PAM sequence: TTT
  source 1..20: mol_type = other DNA
acattgtactaggcattata

SEQ ID NO: 36332 - DNA, 20 bp, synthetic construct
  misc_feature 1..20: note = Description of Artificial Sequence: Synthetic oligonucleotide
  misc_feature 1..20: note = Target: FXN; (+) strand; PAM type: YTN; PAM sequence: TTA
  source 1..20: mol_type = other DNA
cattgtactaggcattataa

SEQ ID NO: 36333 - DNA, 20 bp, synthetic construct
  misc_feature 1..20: note = Description of Artificial Sequence: Synthetic oligonucleotide
  misc_feature 1..20: note = Target: FXN; (+) strand; PAM type: YTN; PAM sequence: TTG
  source 1..20: mol_type = other DNA
tactaggcattataagtaat

SEQ ID NO: 36334 - DNA, 20 bp, synthetic construct
  misc_feature 1..20: note = Description of Artificial Sequence: Synthetic oligonucleotide
  misc_feature 1..20: note = Target: FXN; (+) strand; PAM type: YTN; PAM sequence: CTA
  source 1..20: mol_type = other DNA
ggcattataagtaatctgga

SEQ ID NO: 36335 - DNA, 20 bp, synthetic construct
  misc_feature 1..20: note = Description of Artificial Sequence: Synthetic oligonucleotide
  misc_feature 1..20: note = Target: FXN; (+) strand; PAM type: YTN; PAM sequence: TTA
  source 1..20: mol_type = other DNA
taagtaatctggagatgact

SEQ ID NO: 36336 - DNA, 20 bp, synthetic construct
  misc_feature 1..20: note = Description of Artificial Sequence: Synthetic oligonucleotide
  misc_feature 1..20: note = Target: FXN; (+) strand; PAM type: YTN; PAM sequence: CTG
  source 1..20: mol_type = other DNA
gagatgacttaaagcataca

SEQ ID NO: 36337 - DNA, 20 bp, synthetic construct
  misc_feature 1..20: note = Description of Artificial Sequence: Synthetic oligonucleotide
  misc_feature 1..20: note = Target: FXN; (+) strand; PAM type: YTN; PAM sequence: CTT
  source 1..20: mol_type = other DNA
aaagcatacagaaggatgtg

SEQ ID NO: 36338 - DNA, 20 bp, synthetic construct
  misc_feature 1..20: note = Description of Artificial Sequence: Synthetic oligonucleotide
  misc_feature 1..20: note = Target: FXN; (+) strand; PAM type: YTN; PAM sequence: TTA
  source 1..20: mol_type = other DNA
aagcatacagaaggatgtgc

SEQ ID NO: 36339 - DNA, 20 bp, synthetic construct
  misc_feature 1..20: note = Description of Artificial Sequence: Synthetic oligonucleotide
  misc_feature 1..20: note = Target: FXN; (+) strand; PAM type: YTN; PAM sequence: CTA
  source 1..20: mol_type = other DNA
ggttagatgcatgtatcgta

SEQ ID NO: 36340 - DNA, 20 bp, synthetic construct
  misc_feature 1..20: note = Description of Artificial Sequence: Synthetic oligonucleotide
  misc_feature 1..20: note = Target: FXN; (+) strand; PAM type: YTN; PAM sequence: TTA
  source 1..20: mol_type = other DNA
gatgcatgtatcgtaccatt

SEQ ID NO: 36341 - DNA, 20 bp, synthetic construct
  misc_feature 1..20: note = Description of Artificial Sequence: Synthetic oligonucleotide
  misc_feature 1..20: note = Target: FXN; (+) strand; PAM type: YTN; PAM sequence: TTT
  source 1..20: mol_type = other DNA
catatcagggacttgagtac

SEQ ID NO: 36342 - DNA, 20 bp, synthetic construct
  misc_feature 1..20: note = Description of Artificial Sequence: Synthetic oligonucleotide
  misc_feature 1..20: note = Target: FXN; (+) strand; PAM type: YTN; PAM sequence: TTC
  source 1..20: mol_type = other DNA
atatcagggacttgagtacc

SEQ ID NO: 36343 - DNA, 20 bp, synthetic construct
  misc_feature 1..20: note = Description of Artificial Sequence: Synthetic oligonucleotide
  misc_feature 1..20: note = Target: FXN; (+) strand; PAM type: YTN; PAM sequence: CTT
  source 1..20: mol_type = other DNA
gagtacccacggattttggt

SEQ ID NO: 36344 - DNA, 20 bp, synthetic construct
  misc_feature 1..20: note = Description of Artificial Sequence: Synthetic oligonucleotide
  misc_feature 1..20: note = Target: FXN; (+) strand; PAM type: YTN; PAM sequence: TTG
  source 1..20: mol_type = other DNA
agtacccacggattttggta

SEQ ID NO: 36345 - DNA, 20 bp, synthetic construct
  misc_feature 1..20: note = Description of Artificial Sequence: Synthetic oligonucleotide
  misc_feature 1..20: note = Target: FXN; (+) strand; PAM type: YTN; PAM sequence: TTT
  source 1..20: mol_type = other DNA
tggtatctgcagatcctgga

SEQ ID NO: 36346 - DNA, 20 bp, synthetic construct
  misc_feature 1..20: note = Description of Artificial Sequence: Synthetic oligonucleotide
  misc_feature 1..20: note = Target: FXN; (+) strand; PAM type: YTN; PAM sequence: TTT
  source 1..20: mol_type = other DNA
ggtatctgcagatcctggaa

SEQ ID NO: 36347 - DNA, 20 bp, synthetic construct
  misc_feature 1..20: note = Description of Artificial Sequence: Synthetic oligonucleotide
  misc_feature 1..20: note = Target: FXN; (+) strand; PAM type: YTN; PAM sequence: TTG
  source 1..20: mol_type = other DNA
gtatctgcagatcctggaac

SEQ ID NO: 36348 - DNA, 20 bp, synthetic construct
  misc_feature 1..20: note = Description of Artificial Sequence: Synthetic oligonucleotide
  misc_feature 1..20: note = Target: FXN; (+) strand; PAM type: YTN; PAM sequence: CTG
  source 1..20: mol_type = other DNA
cagatcctggaaccccttcc

SEQ ID NO: 36349 - DNA, 20 bp, synthetic construct
  misc_feature 1..20: note = Description of Artificial Sequence: Synthetic oligonucleotide
  misc_feature 1..20: note = Target: FXN; (+) strand; PAM type: YTN; PAM sequence: CTG
  source 1..20: mol_type = other DNA
gaaccccttccctatggata

SEQ ID NO: 36350 - DNA, 20 bp, synthetic construct
  misc_feature 1..20: note = Description of Artificial Sequence: Synthetic oligonucleotide
  misc_feature 1..20: note = Target: FXN; (+) strand; PAM type: YTN; PAM sequence: CTT
  source 1..20: mol_type = other DNA
ccctatggataccaaggaac

SEQ ID NO: 36351 - DNA, 20 bp, synthetic construct
  misc_feature 1..20: note = Description of Artificial Sequence: Synthetic oligonucleotide
  misc_feature 1..20: note = Target: FXN; (+) strand; PAM type: YTN; PAM sequence: TTC
  source 1..20: mol_type = other DNA
cctatggataccaaggaaca

SEQ ID NO: 36352 - DNA, 20 bp, synthetic construct
  misc_feature 1..20: note = Description of Artificial Sequence: Synthetic oligonucleotide
  misc_feature 1..20: note = Target: FXN; (+) strand; PAM type: YTN; PAM sequence: CTA
  source 1..20: mol_type = other DNA
tggataccaaggaacaacag

SEQ ID NO: 36353 - DNA, 20 bp, synthetic construct
  misc_feature 1..20: note = Description of Artificial Sequence: Synthetic oligonucleotide
  misc_feature 1..20: note = Target: FXN; (+) strand; PAM type: YTN; PAM sequence: CTG
  source 1..20: mol_type = other DNA
ggtctccttttggggtgatg

SEQ ID NO: 36354 - DNA, 20 bp, synthetic construct
  misc_feature 1..20: note = Description of Artificial Sequence: Synthetic oligonucleotide
  misc_feature 1..20: note = Target: FXN; (+) strand; PAM type: YTN; PAM sequence: CTC
  source 1..20: mol_type = other DNA
cttttggggtgatgcagatg

SEQ ID NO: 36355 - DNA, 20 bp, synthetic construct
  misc_feature 1..20: note = Description of Artificial Sequence: Synthetic oligonucleotide
  misc_feature 1..20: note = Target: FXN; (+) strand; PAM type: YTN; PAM sequence: CTT
  source 1..20: mol_type = other DNA
ttggggtgatgcagatgttt

SEQ ID NO: 36356 - DNA, 20 bp, synthetic construct
  misc_feature 1..20: note = Description of Artificial Sequence: Synthetic oligonucleotide
  misc_feature 1..20: note = Target: FXN; (+) strand; PAM type: YTN; PAM sequence: TTT
  source 1..20: mol_type = other DNA
tggggtgatgcagatgtttt

SEQ ID NO: 36357 - DNA, 20 bp, synthetic construct
  misc_feature 1..20: note = Description of Artificial Sequence: Synthetic oligonucleotide
  misc_feature 1..20: note = Target: FXN; (+) strand; PAM type: YTN; PAM sequence: TTT
  source 1..20: mol_type = other DNA
ggggtgatgcagatgttttg

SEQ ID NO: 36358 - DNA, 20 bp, synthetic construct
  misc_feature 1..20: note = Description of Artificial Sequence: Synthetic oligonucleotide
  misc_feature 1..20: note = Target: FXN; (+) strand; PAM type: YTN; PAM sequence: TTG
  source 1..20: mol_type = other DNA
gggtgatgcagatgttttga

SEQ ID NO: 36359 - DNA, 20 bp, synthetic construct
  misc_feature 1..20: note = Description of Artificial Sequence: Synthetic oligonucleotide
  misc_feature 1..20: note = Target: FXN; (+) strand; PAM type: YTN; PAM sequence: TTT
  source 1..20: mol_type = other DNA
tgaagctaggcagaggtagt

SEQ ID NO: 36360 - DNA, 20 bp, synthetic construct
  misc_feature 1..20: note = Description of Artificial Sequence: Synthetic oligonucleotide
  misc_feature 1..20: note = Target: FXN; (+) strand; PAM type: YTN; PAM sequence: TTT
  source 1..20: mol_type = other DNA
gaagctaggcagaggtagtg

SEQ ID NO: 36361 - DNA, 20 bp, synthetic construct
  misc_feature 1..20: note = Description of Artificial Sequence: Synthetic oligonucleotide
  misc_feature 1..20: note = Target: FXN; (+) strand; PAM type: YTN; PAM sequence: TTG
  source 1..20: mol_type = other DNA
aagctaggcagaggtagtgg

SEQ ID NO: 36362 - DNA, 20 bp, synthetic construct
  misc_feature 1..20: note = Description of Artificial Sequence: Synthetic oligonucleotide
  misc_feature 1..20: note = Target: FXN; (+) strand; PAM type: YTN; PAM sequence: CTA
  source 1..20: mol_type = other DNA
ggcagaggtagtggttgcac

SEQ ID NO: 36363 - DNA, 20 bp, synthetic construct
  misc_feature 1..20: note = Description of Artificial Sequence: Synthetic oligonucleotide
  misc_feature 1..20: note = Target: FXN; (+) strand; PAM type: YTN; PAM sequence: TTG
  source 1..20: mol_type = other DNA
cacaacattgtaaatgtact

SEQ ID NO: 36364 - DNA, 20 bp, synthetic construct
  misc_feature 1..20: note = Description of Artificial Sequence: Synthetic oligonucleotide
  misc_feature 1..20: note = Target: FXN; (+) strand; PAM type: YTN; PAM sequence: TTG
  source 1..20: mol_type = other DNA
taaatgtactaaatgccacc

SEQ ID NO: 36365 - DNA, 20 bp, synthetic construct
  misc_feature 1..20: note = Description of Artificial Sequence: Synthetic oligonucleotide
  misc_feature 1..20: note = Target: FXN; (+) strand; PAM type: YTN; PAM sequence: CTA
  source 1..20: mol_type = other DNA
aatgccaccaaattattcat

SEQ ID NO: 36366 - DNA, 20 bp, synthetic construct
  misc_feature 1..20: note = Description of Artificial Sequence: Synthetic oligonucleotide
  misc_feature 1..20: note = Target: FXN; (+) strand; PAM type: YTN; PAM sequence: TTA
  source 1..20: mol_type = other DNA
ttcatttttaaatggttaat

SEQ ID NO: 36367 - DNA, 20 bp, synthetic construct
  misc_feature 1..20: note = Description of Artificial Sequence: Synthetic oligonucleotide
  misc_feature 1..20: note = Target: FXN; (+) strand; PAM type: YTN; PAM sequence: TTC
  source 1..20: mol_type = other DNA
atttttaaatggttaatgtg

SEQ ID NO: 36368 - DNA, 20 bp, synthetic construct
  misc_feature 1..20: note = Description of Artificial Sequence: Synthetic oligonucleotide
  misc_feature 1..20: note = Target: FXN; (+) strand; PAM type: YTN; PAM sequence: TTT
  source 1..20: mol_type = other DNA
ttaaatggttaatgtgttat

SEQ ID NO: 36369 - DNA, 20 bp, synthetic construct
  misc_feature 1..20: note = Description of Artificial Sequence: Synthetic oligonucleotide
  misc_feature 1..20: note = Target: FXN; (+) strand; PAM type: YTN; PAM sequence: TTT
  source 1..20: mol_type = other DNA
taaatggttaatgtgttatg

SEQ ID NO: 36370 - DNA, 20 bp, synthetic construct
  misc_feature 1..20: note = Description of Artificial Sequence: Synthetic oligonucleotide
  misc_feature 1..20: note = Target: FXN; (+) strand; PAM type: YTN; PAM sequence: TTT
  source 1..20: mol_type = other DNA
aaatggttaatgtgttatgt

SEQ ID NO: 36371 - DNA, 20 bp, synthetic construct
  misc_feature 1..20: note = Description of Artificial Sequence: Synthetic oligonucleotide
  misc_feature 1..20: note = Target: FXN; (+) strand; PAM type: YTN; PAM sequence: TTA
  source 1..20: mol_type = other DNA
aatggttaatgtgttatgtg

SEQ ID NO: 36372 - DNA, 20 bp, synthetic construct
  misc_feature 1..20: note = Description of Artificial Sequence: Synthetic oligonucleotide
  misc_feature 1..20: note = Target: FXN; (+) strand; PAM type: YTN; PAM sequence: TTA
  source 1..20: mol_type = other DNA
atgtgttatgtgaatttcac

SEQ ID NO: 36373 - DNA, 20 bp, synthetic construct
  misc_feature 1..20: note = Description of Artificial Sequence: Synthetic oligonucleotide
  misc_feature 1..20: note = Target: FXN; (+) strand; PAM type: YTN; PAM sequence: TTA
  source 1..20: mol_type = other DNA
tgtgaatttcaccttaacaa

SEQ ID NO: 36374 - DNA, 20 bp, synthetic construct
  misc_feature 1..20: note = Description of Artificial Sequence: Synthetic oligonucleotide
  misc_feature 1..20: note = Target: FXN; (+) strand; PAM type: YTN; PAM sequence: TTT
  source 1..20: mol_type = other DNA
caccttaacaactaataata

SEQ ID NO: 36375 - DNA, 20 bp, synthetic construct
  misc_feature 1..20: note = Description of Artificial Sequence: Synthetic oligonucleotide
  misc_feature 1..20: note = Target: FXN; (+) strand; PAM type: YTN; PAM sequence: TTC
  source 1..20: mol_type = other DNA
accttaacaactaataatat

SEQ ID NO: 36376 - DNA, 20 bp, synthetic construct
  misc_feature 1..20: note = Description of Artificial Sequence: Synthetic oligonucleotide
  misc_feature 1..20: note = Target: FXN; (+) strand; PAM type: YTN; PAM sequence: CTT
  source 1..20: mol_type = other DNA
aacaactaataatattatag

SEQ ID NO: 36377 - DNA, 20 bp, synthetic construct
  misc_feature 1..20: note = Description of Artificial Sequence: Synthetic oligonucleotide
  misc_feature 1..20: note = Target: FXN; (+) strand; PAM type: YTN; PAM sequence: TTA
  source 1..20: mol_type = other DNA
acaactaataatattatagg

SEQ ID NO: 36378 - DNA, 20 bp, synthetic construct
  misc_feature 1..20: note = Description of Artificial Sequence: Synthetic oligonucleotide
  misc_feature 1..20: note = Target: FXN; (+) strand; PAM type: YTN; PAM sequence: CTA
  source 1..20: mol_type = other DNA
ataatattataggtaaggca

SEQ ID NO: 36379 - DNA, 20 bp, synthetic construct
  misc_feature 1..20: note = Description of Artificial Sequence: Synthetic oligonucleotide
  misc_feature 1..20: note = Target: FXN; (+) strand; PAM type: YTN; PAM sequence: TTA
  source 1..20: mol_type = other DNA
taggtaaggcacaagttaca

SEQ ID NO: 36380 - DNA, 20 bp, synthetic construct
  misc_feature 1..20: note = Description of Artificial Sequence: Synthetic oligonucleotide
  misc_feature 1..20: note = Target: FXN; (+) strand; PAM type: YTN; PAM sequence: TTA
  source 1..20: mol_type = other DNA
catctgtagcacaaaaatgg

SEQ ID NO: 36381 - DNA, 20 bp, synthetic construct
  misc_feature 1..20: note = Description of Artificial Sequence: Synthetic oligonucleotide
  misc_feature 1..20: note = Target: FXN; (+) strand; PAM type: YTN; PAM sequence: CTG
  source 1..20: mol_type = other DNA
tagcacaaaaatggccctaa

SEQ ID NO: 36382 - DNA, 20 bp, synthetic construct
  misc_feature 1..20: note = Description of Artificial Sequence: Synthetic oligonucleotide
  misc_feature 1..20: note = Target: FXN; (+) strand; PAM type: YTN; PAM sequence: CTA
  source 1..20: mol_type = other DNA
atttttaaaacactgctcca

SEQ ID NO: 36383 - DNA, 20 bp, synthetic construct
  misc_feature 1..20: note = Description of Artificial Sequence: Synthetic oligonucleotide
  misc_feature 1..20: note = Target: FXN; (+) strand; PAM type: YTN; PAM sequence: TTT
  source 1..20: mol_type = other DNA
ttaaaacactgctccagcat

SEQ ID NO: 36384 - DNA, 20 bp, synthetic construct
  misc_feature 1..20: note = Description of Artificial Sequence: Synthetic oligonucleotide
  misc_feature 1..20: note = Target: FXN; (+) strand; PAM type: YTN; PAM sequence: TTT
  source 1..20: mol_type = other DNA
taaaacactgctccagcata

SEQ ID NO: 36385 - DNA, 20 bp, synthetic construct
  misc_feature 1..20: note = Description of Artificial Sequence: Synthetic oligonucleotide
  misc_feature 1..20: note = Target: FXN; (+) strand; PAM type: YTN; PAM sequence: TTT
  source 1..20: mol_type = other DNA
aaaacactgctccagcatag

SEQ ID NO: 36386 - DNA, 20 bp, synthetic construct
  misc_feature 1..20: note = Description of Artificial Sequence: Synthetic oligonucleotide
  misc_feature 1..20: note = Target: FXN; (+) strand; PAM type: YTN; PAM sequence: TTA
  source 1..20: mol_type = other DNA
aaacactgctccagcatagc

SEQ ID NO: 36387 - DNA, 20 bp, synthetic construct
  misc_feature 1..20: note = Description of Artificial Sequence: Synthetic oligonucleotide
  misc_feature 1..20: note = Target: FXN; (+) strand; PAM type: YTN; PAM sequence: CTG
  source 1..20: mol_type = other DNA
ctccagcatagcaggtatca

SEQ ID NO: 36388 - DNA, 20 bp, synthetic construct
  misc_feature 1..20: note = Description of Artificial Sequence: Synthetic oligonucleotide
  misc_feature 1..20: note = Target: FXN; (+) strand; PAM type: YTN; PAM sequence: CTC
  source 1..20: mol_type = other DNA
cagcatagcaggtatcacat

SEQ ID NO: 36389 - DNA, 20 bp, synthetic construct
  misc_feature 1..20: note = Description of Artificial Sequence: Synthetic oligonucleotide
  misc_feature 1..20: note = Target: FXN; (+) strand; PAM type: YTN; PAM sequence: CTG
  source 1..20: mol_type = other DNA
gagatcaaagtgtgatacct

SEQ ID NO: 36390 - DNA, 20 bp, synthetic construct
  misc_feature 1..20: note = Description of Artificial Sequence: Synthetic oligonucleotide
  misc_feature 1..20: note = Target: FXN; (+) strand; PAM type: YTN; PAM sequence: CTG
  source 1..20: mol_type = other DNA
gagacttatcagtaagggtc

SEQ ID NO: 36391 - DNA, 20 bp, synthetic construct
  misc_feature 1..20: note = Description of Artificial Sequence: Synthetic oligonucleotide
  misc_feature 1..20: note = Target: FXN; (+) strand; PAM type: YTN; PAM sequence: CTT
  source 1..20: mol_type = other DNA
atcagtaagggtcaaatgtt

SEQ ID NO: 36392 - DNA, 20 bp, synthetic construct
  misc_feature 1..20: note = Description of Artificial Sequence: Synthetic oligonucleotide
  misc_feature 1..20: note = Target: FXN; (+) strand; PAM type: YTN; PAM sequence: TTA
  source 1..20: mol_type = other DNA
tcagtaagggtcaaatgttt

SEQ ID NO: 36393 - DNA, 20 bp, synthetic construct
  misc_feature 1..20: note = Description of Artificial Sequence: Synthetic oligonucleotide
  misc_feature 1..20: note = Target: FXN; (+) strand; PAM type: YTN; PAM sequence: TTT
  source 1..20: mol_type = other DNA
tttcaggttttgagaatcat

SEQ ID NO: 36394 - DNA, 20 bp, synthetic construct
  misc_feature 1..20: note = Description of Artificial Sequence: Synthetic oligonucleotide
  misc_feature 1..20: note = Target: FXN; (+) strand; PAM type: YTN; PAM sequence: TTT
  source 1..20: mol_type = other DNA
ttcaggttttgagaatcatt

SEQ ID NO: 36395 - DNA, 20 bp, synthetic construct
  misc_feature 1..20: note = Description of Artificial Sequence: Synthetic oligonucleotide
  misc_feature 1..20: note = Target: FXN; (+) strand; PAM type: YTN; PAM sequence: TTT
  source 1..20: mol_type = other DNA
tcaggttttgagaatcattc

SEQ ID NO: 36396 - DNA, 20 bp, synthetic construct
  misc_feature 1..20: note = Description of Artificial Sequence: Synthetic oligonucleotide
  misc_feature 1..20: note = Target: FXN; (+) strand; PAM type: YTN; PAM sequence: TTT
  source 1..20: mol_type = other DNA
caggttttgagaatcattct

SEQ ID NO: 36397 - DNA, 20 bp, synthetic construct
  misc_feature 1..20: note = Description of Artificial Sequence: Synthetic oligonucleotide
  misc_feature 1..20: note = Target: FXN; (+) strand; PAM type: YTN; PAM sequence: TTC
  source 1..20: mol_type = other DNA
aggttttgagaatcattctt

SEQ ID NO: 36398 - DNA, 20 bp, synthetic construct
  misc_feature 1..20: note = Description of Artificial Sequence: Synthetic oligonucleotide
  misc_feature 1..20: note = Target: FXN; (+) strand; PAM type: YTN; PAM sequence: TTT
  source 1..20: mol_type = other DNA
tgagaatcattcttggaatt

SEQ ID NO: 36399 - DNA, 20 bp, synthetic construct
  misc_feature 1..20: note = Description of Artificial Sequence: Synthetic oligonucleotide
  misc_feature 1..20: note = Target: FXN; (+) strand; PAM type: YTN; PAM sequence: TTT
  source 1..20: mol_type = other DNA
gagaatcattcttggaattg

SEQ ID NO: 36400 - DNA, 20 bp, synthetic construct
  misc_feature 1..20: note = Description of Artificial Sequence: Synthetic oligonucleotide
  misc_feature 1..20: note = Target: FXN; (+) strand; PAM type: YTN; PAM sequence: TTG
  source 1..20: mol_type = other DNA
agaatcattcttggaattgt

SEQ ID NO: 36401 - DNA, 20 bp, synthetic construct
  misc_feature 1..20: note = Description of Artificial Sequence: Synthetic oligonucleotide
  misc_feature 1..20: note = Target: FXN; (+) strand; PAM type: YTN; PAM sequence: TTC
  source 1..20: mol_type = other DNA
ttggaattgttccagaagat

SEQ ID NO: 36402 - DNA, 20 bp, synthetic construct
  misc_feature 1..20: note = Description of Artificial Sequence: Synthetic oligonucleotide
  misc_feature 1..20: note = Target: FXN; (+) strand; PAM type: YTN; PAM sequence: CTT
  source 1..20: mol_type = other DNA
ggaattgttccagaagatat

SEQ ID NO: 36403 - DNA, 20 bp, synthetic construct
  misc_feature 1..20: note = Description of Artificial Sequence: Synthetic oligonucleotide
  misc_feature 1..20: note = Target: FXN; (+) strand; PAM type: YTN; PAM sequence: TTG
  source 1..20: mol_type = other DNA
gaattgttccagaagatata

SEQ ID NO: 36404 - DNA, 20 bp, synthetic construct
  misc_feature 1..20: note = Description of Artificial Sequence: Synthetic oligonucleotide
  misc_feature 1..20: note = Target: FXN; (+) strand; PAM type: YTN; PAM sequence: TTG
  source 1..20: mol_type = other DNA
ttccagaagatatatcgtat

SEQ ID NO: 36405 - DNA, 20 bp, synthetic construct
  misc_feature 1..20: note = Description of Artificial Sequence: Synthetic oligonucleotide
  misc_feature 1..20: note = Target: FXN; (+) strand; PAM type: YTN; PAM sequence: TTC
  source 1..20: mol_type = other DNA
cagaagatatatcgtataac

SEQ ID NO: 36406 - DNA, 20 bp, synthetic construct
  misc_feature 1..20: note = Description of Artificial Sequence: Synthetic oligonucleotide
  misc_feature 1..20: note = Target: FXN; (+) strand; PAM type: YTN; PAM sequence: CTC
  source 1..20: mol_type = other DNA
ttcttagatgctaagataag

SEQ ID NO: 36407 - DNA, 20 bp, synthetic construct
  misc_feature 1..20: note = Description of Artificial Sequence: Synthetic oligonucleotide
  misc_feature 1..20: note = Target: FXN; (+) strand; PAM type: YTN; PAM sequence: CTT
  source 1..20: mol_type = other DNA
cttagatgctaagataagaa

SEQ ID NO: 36408 - DNA, 20 bp, synthetic construct
  misc_feature 1..20: note = Description of Artificial Sequence: Synthetic oligonucleotide
  misc_feature 1..20: note = Target: FXN; (+) strand; PAM type: YTN; PAM sequence: TTC
  source 1..20: mol_type = other DNA
ttagatgctaagataagaag

SEQ ID NO: 36409 - DNA, 20 bp, synthetic construct
  misc_feature 1..20: note = Description of Artificial Sequence: Synthetic oligonucleotide
  misc_feature 1..20: note = Target: FXN; (+) strand; PAM type: YTN; PAM sequence: CTT
  source 1..20: mol_type = other DNA
agatgctaagataagaaggc

SEQ ID NO: 36410 - DNA, 20 bp, synthetic construct
  misc_feature 1..20: note = Description of Artificial Sequence: Synthetic oligonucleotide
  misc_feature 1..20: note = Target: FXN; (+) strand; PAM type: YTN; PAM sequence: TTA
  source 1..20: mol_type = other DNA
gatgctaagataagaaggca

SEQ ID NO: 36411 - DNA, 20 bp, synthetic construct
  misc_feature 1..20: note = Description of Artificial Sequence: Synthetic oligonucleotide
  misc_feature 1..20: note = Target: FXN; (+) strand; PAM type: YTN; PAM sequence: CTA
  source 1..20: mol_type = other DNA
agataagaaggcagatatac

SEQ ID NO: 36412 - DNA, 20 bp, synthetic construct
  misc_feature 1..20: note = Description of Artificial Sequence: Synthetic oligonucleotide
  misc_feature 1..20: note = Target: FXN; (+) strand; PAM type: YTN; PAM sequence: CTA
  source 1..20: mol_type = other DNA
gctcattttgtgttattttc

SEQ ID NO: 36413 - DNA, 20 bp, synthetic construct
  misc_feature 1..20: note = Description of Artificial Sequence: Synthetic oligonucleotide
  misc_feature 1..20: note = Target: FXN; (+) strand; PAM type: YTN; PAM sequence: CTC
  source 1..20: mol_type = other DNA
attttgtgttattttctaga

SEQ ID NO: 36414 - DNA, 20 bp, synthetic construct
  misc_feature 1..20: note = Description of Artificial Sequence: Synthetic oligonucleotide
  misc_feature 1..20: note = Target: FXN; (+) strand; PAM type: YTN; PAM sequence: TTT
  source 1..20: mol_type = other DNA
tgtgttattttctagagctt

SEQ ID NO: 36415 - DNA, 20 bp, synthetic construct
  misc_feature 1..20: note = Description of Artificial Sequence: Synthetic oligonucleotide
  misc_feature 1..20: note = Target: FXN; (+) strand; PAM type: YTN; PAM sequence: TTT
  source 1..20: mol_type = other DNA
gtgttattttctagagcttt

SEQ ID NO: 36416 - DNA, 20 bp, synthetic construct
  misc_feature 1..20: note = Description of Artificial Sequence: Synthetic oligonucleotide
  misc_feature 1..20: note = Target: FXN; (+) strand; PAM type: YTN; PAM sequence: TTG
  source 1..20: mol_type = other DNA
tgttattttctagagcttta

SEQ ID NO: 36417 - DNA, 20 bp, synthetic construct
  misc_feature 1..20: note = Description of Artificial Sequence: Synthetic oligonucleotide
  misc_feature 1..20: note = Target: FXN; (+) strand; PAM type: YTN; PAM sequence: TTA
  source 1..20: mol_type = other DNA
ttttctagagctttactcca

SEQ ID NO: 36418 - DNA, 20 bp, synthetic construct
  misc_feature 1..20: note = Description of Artificial Sequence: Synthetic oligonucleotide
  misc_feature 1..20: note = Target: FXN; (+) strand; PAM type: YTN; PAM sequence: TTT
  source 1..20: mol_type = other DNA
tctagagctttactccagtc

SEQ ID NO: 36419 - DNA, 20 bp, synthetic construct
  misc_feature 1..20: note = Description of Artificial Sequence: Synthetic oligonucleotide
  misc_feature 1..20: note = Target: FXN; (+) strand; PAM type: YTN; PAM sequence: TTT
  source 1..20: mol_type = other DNA
ctagagctttactccagtca

SEQ ID NO: 36420 - DNA, 20 bp, synthetic construct
  misc_feature 1..20: note = Description of Artificial Sequence: Synthetic oligonucleotide
  misc_feature 1..20: note = Target: FXN; (+) strand; PAM type: YTN; PAM sequence: TTC
  source 1..20: mol_type = other DNA
tagagctttactccagtcaa

SEQ ID NO: 36421 - DNA, 20 bp, synthetic construct
  misc_feature 1..20: note = Description of Artificial Sequence: Synthetic oligonucleotide
  misc_feature 1..20: note = Target: FXN; (+) strand; PAM type: YTN; PAM sequence: CTA
  source 1..20: mol_type = other DNA
gagctttactccagtcaatt

SEQ ID NO: 36422 - DNA, 20 bp, synthetic construct
  misc_feature 1..20: note = Description of Artificial Sequence: Synthetic oligonucleotide
  misc_feature 1..20: note = Target: FXN; (+) strand; PAM type: YTN; PAM sequence: CTT
  source 1..20: mol_type = other DNA
tactccagtcaatttcttgg

SEQ ID NO: 36423 - DNA, 20 bp, synthetic construct
  misc_feature 1..20: note = Description of Artificial Sequence: Synthetic oligonucleotide
  misc_feature 1..20: note = Target: FXN; (+) strand; PAM type: YTN; PAM sequence: TTT
  source 1..20: mol_type = other DNA
actccagtcaatttcttggg

SEQ ID NO: 36424 - DNA, 20 bp, synthetic construct
  misc_feature 1..20: note = Description of Artificial Sequence: Synthetic oligonucleotide
  misc_feature 1..20: note = Target: FXN; (+) strand; PAM type: YTN; PAM sequence: TTA
  source 1..20: mol_type = other DNA
ctccagtcaatttcttgggg

SEQ ID NO: 36425 - DNA, 20 bp, synthetic construct
  misc_feature 1..20: note = Description of Artificial Sequence: Synthetic oligonucleotide
  misc_feature 1..20: note = Target: FXN; (+) strand; PAM type: YTN; PAM sequence: CTC
  source 1..20: mol_type = other DNA
cagtcaatttcttgggggca

SEQ ID NO: 36426 - DNA, 20 bp, synthetic construct
  misc_feature 1..20: note = Description of Artificial Sequence: Synthetic oligonucleotide
  misc_feature 1..20: note = Target: FXN; (+) strand; PAM type: YTN; PAM sequence: TTT
  source 1..20: mol_type = other DNA
cttgggggcagcatttgtgg

SEQ ID NO: 36427 - DNA, 20 bp, synthetic construct
  misc_feature 1..20: note = Description of Artificial Sequence: Synthetic oligonucleotide
  misc_feature 1..20: note = Target: FXN; (+) strand; PAM type: YTN; PAM sequence: TTC
  source 1..20: mol_type = other DNA
ttgggggcagcatttgtgga

SEQ ID NO: 36428 - DNA, 20 bp, synthetic construct
  misc_feature 1..20: note = Description of Artificial Sequence: Synthetic oligonucleotide
  misc_feature 1..20: note = Target: FXN; (+) strand; PAM type: YTN; PAM sequence: CTT
  source 1..20: mol_type = other DNA
gggggcagcatttgtggaat

SEQ ID NO: 36429 - DNA, 20 bp, synthetic construct
  misc_feature 1..20: note = Description of Artificial Sequence: Synthetic oligonucleotide
  misc_feature 1..20: note = Target: FXN; (+) strand; PAM type: YTN; PAM sequence: TTG
  source 1..20: mol_type = other DNA
ggggcagcatttgtggaatc

SEQ ID NO: 36430 - DNA, 20 bp, synthetic construct
  misc_feature 1..20: note = Description of Artificial Sequence: Synthetic oligonucleotide
  misc_feature 1..20: note = Target: FXN; (+) strand; PAM type: YTN; PAM sequence: TTT
  source 1..20: mol_type = other DNA
gtggaatcagtggttcatct

SEQ ID NO: 36431 - DNA, 20 bp, synthetic construct
  misc_feature 1..20: note = Description of Artificial Sequence: Synthetic oligonucleotide
  misc_feature 1..20: note = Target: FXN; (+) strand; PAM type: YTN; PAM sequence: TTG
  source 1..20: mol_type = other DNA
tggaatcagtggttcatctg

SEQ ID NO: 36432 - DNA, 20 bp, synthetic construct
  misc_feature 1..20: note = Description of Artificial Sequence: Synthetic oligonucleotide
  misc_feature 1..20: note = Target: FXN; (+) strand; PAM type: YTN; PAM sequence: TTC
  source 1..20: mol_type = other DNA
atctgaagggctgtgctgtg

SEQ ID NO: 36433 - DNA, 20 bp, synthetic construct
  misc_feature 1..20: note = Description of Artificial Sequence: Synthetic oligonucleotide
  misc_feature 1..20: note = Target: FXN; (+) strand; PAM type: YTN; PAM sequence: CTG
  source 1..20: mol_type = other DNA
aagggctgtgctgtggaatt

SEQ ID NO: 36434 - DNA, 20 bp, synthetic construct
  misc_feature 1..20: note = Description of Artificial Sequence: Synthetic oligonucleotide
  misc_feature 1..20: note = Target: FXN; (+) strand; PAM type: YTN; PAM sequence: CTG
  source 1..20: mol_type = other DNA
tgctgtggaattactatgca

SEQ ID NO: 36435 - DNA, 20 bp, synthetic construct
  misc_feature 1..20: note = Description of Artificial Sequence: Synthetic oligonucleotide
  misc_feature 1..20: note = Target: FXN; (+) strand; PAM type: YTN; PAM sequence: CTG
  source 1..20: mol_type = other DNA
tggaattactatgcatttgt

SEQ ID NO: 36436 - DNA, 20 bp, synthetic construct
  misc_feature 1..20: note = Description of Artificial Sequence: Synthetic oligonucleotide
  misc_feature 1..20: note = Target: FXN; (+) strand; PAM type: YTN; PAM sequence: TTA
  source 1..20: mol_type = other DNA
ctatgcatttgttttgtctt

SEQ ID NO: 36437 - DNA, 20 bp, synthetic construct
  misc_feature 1..20: note = Description of Artificial Sequence: Synthetic oligonucleotide
  misc_feature 1..20: note = Target: FXN; (+) strand; PAM type: YTN; PAM sequence: CTA
  source 1..20: mol_type = other DNA
tgcatttgttttgtcttcca

SEQ ID NO: 36438 - DNA, 20 bp, synthetic construct
  misc_feature 1..20: note = Description of Artificial Sequence: Synthetic oligonucleotide
  misc_feature 1..20: note = Target: FXN; (+) strand; PAM type: YTN; PAM sequence: TTT
  source 1..20: mol_type = other DNA
gttttgtcttccagtggacc

SEQ ID NO: 36439 - DNA, 20 bp, synthetic construct
  misc_feature 1..20: note = Description of Artificial Sequence: Synthetic oligonucleotide
  misc_feature 1..20: note = Target: FXN; (+) strand; PAM type: YTN; PAM sequence: TTG
  source 1..20: mol_type = other DNA
ttttgtcttccagtggacct

SEQ ID NO: 36440 - DNA, 20 bp, synthetic construct
  misc_feature 1..20: note = Description of Artificial Sequence: Synthetic oligonucleotide
  misc_feature 1..20: note = Target: FXN; (+) strand; PAM type: YTN; PAM sequence: TTT
  source 1..20: mol_type = other DNA
tgtcttccagtggacctaag

SEQ ID NO: 36441 - DNA, 20 bp, synthetic construct
  misc_feature 1..20: note = Description of Artificial Sequence: Synthetic oligonucleotide
  misc_feature 1..20: note = Target: FXN; (+) strand; PAM type: YTN; PAM sequence: TTT
  source 1..20: mol_type = other DNA
gtcttccagtggacctaagc

SEQ ID NO: 36442 - DNA, 20 bp, synthetic construct
  misc_feature 1..20: note = Description of Artificial Sequence: Synthetic oligonucleotide
  misc_feature 1..20: note = Target: FXN; (+) strand; PAM type: YTN; PAM sequence: TTG
  source 1..20: mol_type = other DNA
tcttccagtggacctaagcg

SEQ ID NO: 36443 - DNA, 20 bp, synthetic construct
  misc_feature 1..20: note = Description of Artificial Sequence: Synthetic oligonucleotide
  misc_feature 1..20: note = Target: FXN; (+) strand; PAM type: YTN; PAM sequence: CTT
  source 1..20: mol_type = other DNA
ccagtggacctaagcgttat

SEQ ID NO: 36444 - DNA, 20 bp, synthetic construct
  misc_feature 1..20: note = Description of Artificial Sequence: Synthetic oligonucleotide
  misc_feature 1..20: note = Target: FXN; (+) strand; PAM type: YTN; PAM sequence: TTC
  source 1..20: mol_type = other DNA
cagtggacctaagcgttatg

SEQ ID NO: 36445 - DNA, 20 bp, synthetic construct
  misc_feature 1..20: note = Description of Artificial Sequence: Synthetic oligonucleotide
  misc_feature 1..20: note = Target: FXN; (+) strand; PAM type: YTN; PAM sequence: CTA
  source 1..20: mol_type = other DNA
agcgttatgactggactggg

SEQ ID NO: 36446 - DNA, 20 bp, synthetic construct
  misc_feature 1..20: note = Description of Artificial Sequence: Synthetic oligonucleotide
  misc_feature 1..20: note = Target: FXN; (+) strand; PAM type: YTN; PAM sequence: TTA
  source 1..20: mol_type = other DNA
tgactggactgggaaaaact

SEQ ID NO: 36447 - DNA, 20 bp, synthetic construct
  misc_feature 1..20: note = Description of Artificial Sequence: Synthetic oligonucleotide
  misc_feature 1..20: note = Target: FXN; (+) strand; PAM type: YTN; PAM sequence: CTG
  source 1..20: mol_type = other DNA
gactgggaaaaactgggtgt

SEQ ID NO: 36448 - DNA, 20 bp, synthetic construct
  misc_feature 1..20: note = Description of Artificial Sequence: Synthetic oligonucleotide
  misc_feature 1..20: note = Target: FXN; (+) strand; PAM type: YTN; PAM sequence: CTG
  source 1..20: mol_type = other DNA
ggaaaaactgggtgtactcc

SEQ ID NO: 36449 - DNA, 20 bp, synthetic construct
  misc_feature 1..20: note = Description of Artificial Sequence: Synthetic oligonucleotide
  misc_feature 1..20: note = Target: FXN; (+) strand; PAM type: YTN; PAM sequence: CTG
  source 1..20: mol_type = other DNA
ggtgtactcccacgacggcg

SEQ ID NO: 36450 - DNA, 20 bp, synthetic construct
  misc_feature 1..20: note = Description of Artificial Sequence: Synthetic oligonucleotide
  misc_feature 1..20: note = Target: FXN; (+) strand; PAM type: YTN; PAM sequence: CTC
  source 1..20: mol_type = other DNA
ccacgacggcgtgtccctcc

SEQ ID NO: 36451 - DNA, 20 bp, synthetic construct
  misc_feature 1..20: note = Description of Artificial Sequence: Synthetic oligonucleotide
  misc_feature 1..20: note = Target: FXN; (+) strand; PAM type: YTN; PAM sequence: CTC
  source 1..20: mol_type = other DNA
catgagctgctggccgcaga

SEQ ID NO: 36452 - DNA, 20 bp, synthetic construct
  misc_feature 1..20: note = Description of Artificial Sequence: Synthetic oligonucleotide
  misc_feature 1..20: note = Target: FXN; (+) strand; PAM type: YTN; PAM sequence: CTG
  source 1..20: mol_type = other DNA
ctggccgcagagctcactaa

SEQ ID NO: 36453 - DNA, 20 bp, synthetic construct
  misc_feature 1..20: note = Description of Artificial Sequence: Synthetic oligonucleotide
  misc_feature 1..20: note = Target: FXN; (+) strand; PAM type: YTN; PAM sequence: CTG
  source 1..20: mol_type = other DNA
gccgcagagctcactaaagc

SEQ ID NO: 36454 - DNA, 20 bp, synthetic construct
  misc_feature 1..20: note = Description of Artificial Sequence: Synthetic oligonucleotide
  misc_feature 1..20: note = Target: FXN; (+) strand; PAM type: YTN; PAM sequence: CTC
  source 1..20: mol_type = other DNA
actaaagccttaaaaaccaa

SEQ ID NO: 36455 - DNA, 20 bp, synthetic construct
  misc_feature 1..20: note = Description of Artificial Sequence: Synthetic oligonucleotide
  misc_feature 1..20: note = Target: FXN; (+) strand; PAM type: YTN; PAM sequence: CTA
  source 1..20: mol_type = other DNA
aagccttaaaaaccaaactg

SEQ ID NO: 36456 - DNA, 20 bp, synthetic construct
  misc_feature 1..20: note = Description of Artificial Sequence: Synthetic oligonucleotide
  misc_feature 1..20: note = Target: FXN; (+) strand; PAM type: YTN; PAM sequence: CTT
  source 1..20: mol_type = other DNA
aaaaaccaaactggacttgt

SEQ ID NO: 36457 - DNA, 20 bp, synthetic construct
  misc_feature 1..20: note = Description of Artificial Sequence: Synthetic oligonucleotide
  misc_feature 1..20: note = Target: FXN; (+) strand; PAM type: YTN; PAM sequence: TTA
  source 1..20: mol_type = other DNA
aaaaccaaactggacttgtc

SEQ ID NO: 36458 - DNA, 20 bp, synthetic construct
  misc_feature 1..20: note = Description of Artificial Sequence: Synthetic oligonucleotide
  misc_feature 1..20: note = Target: FXN; (+) strand; PAM type: YTN; PAM sequence: CTG
  source 1..20: mol_type = other DNA
gacttgtcttccttggccta

SEQ ID NO: 36459 - DNA, 20 bp, synthetic construct
  misc_feature 1..20: note = Description of Artificial Sequence: Synthetic oligonucleotide
  misc_feature 1..20: note = Target: FXN; (+) strand; PAM type: YTN; PAM sequence: CTT
  source 1..20: mol_type = other DNA
gtcttccttggcctattccg

SEQ ID NO: 36460 - DNA, 20 bp, synthetic construct
  misc_feature 1..20: note = Description of Artificial Sequence: Synthetic oligonucleotide
  misc_feature 1..20: note = Target: FXN; (+) strand; PAM type: YTN; PAM sequence: TTG
  source 1..20: mol_type = other DNA
tcttccttggcctattccgg

SEQ ID NO: 36461 - DNA, 20 bp, synthetic construct
  misc_feature 1..20: note = Description of Artificial Sequence: Synthetic oligonucleotide
  misc_feature 1..20: note = Target: FXN; (+) strand; PAM type: YTN; PAM sequence: CTT
  source 1..20: mol_type = other DNA
ccttggcctattccggaaaa

SEQ ID NO: 36462 - DNA, 20 bp, synthetic construct
  misc_feature 1..20: note = Description of Artificial Sequence: Synthetic oligonucleotide
  misc_feature 1..20: note = Target: FXN; (+) strand; PAM type: YTN; PAM sequence: TTC
  source 1..20: mol_type = other DNA
cttggcctattccggaaaag

SEQ ID NO: 36463 - DNA, 20 bp, synthetic construct
  misc_feature 1..20: note = Description of Artificial Sequence: Synthetic oligonucleotide
  misc_feature 1..20: note = Target: FXN; (+) strand; PAM type: YTN; PAM sequence: CTT
  source 1..20: mol_type = other DNA
ggcctattccggaaaagatg

SEQ ID NO: 36464 - DNA, 20 bp, synthetic construct
  misc_feature 1..20: note = Description of Artificial Sequence: Synthetic oligonucleotide
  misc_feature 1..20: note = Target: FXN; (+) strand; PAM type: YTN; PAM sequence: TTG
  source 1..20: mol_type = other DNA
gcctattccggaaaagatgc

SEQ ID NO: 36465 - DNA, 20 bp, synthetic construct
  misc_feature 1..20: note = Description of Artificial Sequence: Synthetic oligonucleotide
  misc_feature 1..20: note = Target: FXN; (+) strand; PAM type: YTN; PAM sequence: CTA
  source 1..20: mol_type = other DNA
ttccggaaaagatgcttgat

SEQ ID NO: 36466 - DNA, 20 bp, synthetic construct
  misc_feature 1..20: note = Description of Artificial Sequence: Synthetic oligonucleotide
  misc_feature 1..20: note = Target: FXN; (+) strand; PAM type: YTN; PAM sequence: TTC
  source 1..20: mol_type = other DNA
cggaaaagatgcttgatgcc

SEQ ID NO: 36467 - DNA, 20 bp, synthetic construct
  misc_feature 1..20: note = Description of Artificial Sequence: Synthetic oligonucleotide
  misc_feature 1..20: note = Target: FXN; (+) strand; PAM type: YTN; PAM sequence: CTT
  source 1..20: mol_type = other DNA
gatgcccagccccgttttaa

SEQ ID NO: 36468 - DNA, 20 bp, synthetic construct
  misc_feature 1..20: note = Description of Artificial Sequence: Synthetic oligonucleotide
  misc_feature 1..20: note = Target: FXN; (+) strand; PAM type: YTN; PAM sequence: TTG
  source 1..20: mol_type = other DNA
atgcccagccccgttttaag

SEQ ID NO: 36469 - DNA, 20 bp, synthetic construct
  misc_feature 1..20: note = Description of Artificial Sequence: Synthetic oligonucleotide
  misc_feature 1..20: note = Target: FXN; (+) strand; PAM type: YTN; PAM sequence: TTT
  source 1..20: mol_type = other DNA
taaggacattaaaagctatc

SEQ ID NO: 36470 - DNA, 20 bp, synthetic construct
  misc_feature 1..20: note = Description of Artificial Sequence: Synthetic oligonucleotide
  misc_feature 1..20: note = Target: FXN; (+) strand; PAM type: YTN; PAM sequence: TTT
  source 1..20: mol_type = other DNA
aaggacattaaaagctatca

SEQ ID NO: 36471 - DNA, 20 bp, synthetic construct
  misc_feature 1..20: note = Description of Artificial Sequence: Synthetic oligonucleotide
  misc_feature 1..20: note = Target: FXN; (+) strand; PAM type: YTN; PAM sequence: TTA
  source 1..20: mol_type = other DNA
aggacattaaaagctatcag

SEQ ID NO: 36472 - DNA, 20 bp, synthetic construct
  misc_feature 1..20: note = Description of Artificial Sequence: Synthetic oligonucleotide
  misc_feature 1..20: note = Target: FXN; (+) strand; PAM type: YTN; PAM sequence: TTA
  source 1..20: mol_type = other DNA
aaagctatcaggccaagacc

SEQ ID NO: 36473 - DNA, 20 bp, synthetic construct
  misc_feature 1..20: note = Description of Artificial Sequence: Synthetic oligonucleotide
  misc_feature 1..20: note = Target: FXN; (+) strand; PAM type: YTN; PAM sequence: CTA
  source 1..20: mol_type = other DNA
tcaggccaagaccccagctt

SEQ ID NO: 36474 - DNA, 20 bp, synthetic construct
  misc_feature 1..20: note = Description of Artificial Sequence: Synthetic oligonucleotide
  misc_feature 1..20: note = Target: FXN; (+) strand; PAM type: YTN; PAM sequence: CTT
  source 1..20: mol_type = other DNA
cattatgcagctgaggtctg

SEQ ID NO: 36475 - DNA, 20 bp, synthetic construct
  misc_feature 1..20: note = Description of Artificial Sequence: Synthetic oligonucleotide
  misc_feature 1..20: note = Target: FXN; (+) strand; PAM type: YTN; PAM sequence: TTC
  source 1..20: mol_type = other DNA
attatgcagctgaggtctgt

SEQ ID NO: 36476 - DNA, 20 bp, synthetic construct
  misc_feature 1..20: note = Description of Artificial Sequence: Synthetic oligonucleotide
  misc_feature 1..20: note = Target: FXN; (+) strand; PAM type: YTN; PAM sequence: TTA
  source 1..20: mol_type = other DNA
tgcagctgaggtctgttttt

SEQ ID NO: 36477 - DNA, 20 bp, synthetic construct
  misc_feature 1..20: note = Description of Artificial Sequence: Synthetic oligonucleotide
  misc_feature 1..20: note = Target: FXN; (+) strand; PAM type: YTN; PAM sequence: CTG
  source 1..20: mol_type = other DNA
aggtctgttttttgttgttg

SEQ ID NO: 36478 - DNA, 20 bp, synthetic construct
  misc_feature 1..20: note = Description of Artificial Sequence: Synthetic oligonucleotide
  misc_feature 1..20: note = Target: FXN; (+) strand; PAM type: YTN; PAM sequence: CTG
  source 1..20: mol_type = other DNA
ttttttgttgttgttgttgt

SEQ ID NO: 36479 - DNA, 20 bp, synthetic construct
  misc_feature 1..20: note = Description of Artificial Sequence: Synthetic oligonucleotide
  misc_feature 1..20: note = Target: FXN; (+) strand; PAM type: YTN; PAM sequence: TTT
  source 1..20: mol_type = other DNA
tttgttgttgttgttgttta

SEQ ID NO: 36480 - DNA, 20 bp, synthetic construct
  misc_feature 1..20: note = Description of Artificial Sequence: Synthetic oligonucleotide
  misc_feature 1..20: note = Target: FXN; (+) strand; PAM type: YTN; PAM sequence: TTT
  source 1..20: mol_type = other DNA
ttgttgttgttgttgtttat

SEQ ID NO: 36481 - DNA, 20 bp, synthetic construct
  misc_feature 1..20: note = Description of Artificial Sequence: Synthetic oligonucleotide
  misc_feature 1..20: note = Target: FXN; (+) strand; PAM type: YTN; PAM sequence: TTT
  source 1..20: mol_type = other DNA
tgttgttgttgttgtttatt

SEQ ID NO: 36482 - DNA, 20 bp, synthetic construct
  misc_feature 1..20: note = Description of Artificial Sequence: Synthetic oligonucleotide
  misc_feature 1..20: note = Target: FXN; (+) strand; PAM type: YTN; PAM sequence: TTT
  source 1..20: mol_type = other DNA
gttgttgttgttgtttattt

SEQ ID NO: 36483 - DNA, 20 bp, synthetic construct
  misc_feature 1..20: note = Description of Artificial Sequence: Synthetic oligonucleotide
  misc_feature 1..20: note = Target: FXN; (+) strand; PAM type: YTN; PAM sequence: TTG
  source 1..20: mol_type = other DNA
ttgttgttgttgtttatttt

SEQ ID NO: 36484 - DNA, 20 bp, synthetic construct
  misc_feature 1..20: note = Description of Artificial Sequence: Synthetic oligonucleotide
  misc_feature 1..20: note = Target: FXN; (+) strand; PAM type: YTN; PAM sequence: TTG
  source 1..20: mol_type = other DNA
ttgttgttgtttattttttt

SEQ ID NO: 36485 - DNA, 20 bp, synthetic construct
  misc_feature 1..20: note = Description of Artificial Sequence: Synthetic oligonucleotide
  misc_feature 1..20: note = Target: FXN; (+) strand; PAM type: YTN; PAM sequence: TTG
  source 1..20: mol_type = other DNA
ttgttgtttattttttttat

SEQ ID NO: 36486 - DNA, 20 bp, synthetic construct
  misc_feature 1..20: note = Description of Artificial Sequence: Synthetic oligonucleotide
  misc_feature 1..20: note = Target: FXN; (+) strand; PAM type: YTN; PAM sequence: TTG
  source 1..20: mol_type = other DNA
ttgtttattttttttattcc

SEQ ID NO: 36487 - DNA, 20 bp, synthetic construct
  misc_feature 1..20: note = Description of Artificial Sequence: Synthetic oligonucleotide
  misc_feature 1..20: note = Target: FXN; (+) strand; PAM type: YTN; PAM sequence: TTG
  source 1..20: mol_type = other DNA
tttattttttttattcctgc

SEQ ID NO: 36488 - DNA, 20 bp, synthetic construct
  misc_feature 1..20: note = Description of Artificial Sequence: Synthetic oligonucleotide
  misc_feature 1..20: note = Target: FXN; (+) strand; PAM type: YTN; PAM sequence: TTT
  source 1..20: mol_type = other DNA
attttttttattcctgcttt

SEQ ID NO: 36489 - DNA, 20 bp, synthetic construct
  misc_feature 1..20: note = Description of Artificial Sequence: Synthetic oligonucleotide
  misc_feature 1..20: note = Target: FXN; (+) strand; PAM type: YTN; PAM sequence: TTA
  source 1..20: mol_type = other DNA
ttttttttattcctgctttt

SEQ ID NO: 36490 - DNA, 20 bp, synthetic construct
  misc_feature 1..20: note = Description of Artificial Sequence: Synthetic oligonucleotide
  misc_feature 1..20: note = Target: FXN; (+) strand; PAM type: YTN; PAM sequence: TTT
  source 1..20: mol_type = other DNA
tttttattcctgcttttgag

SEQ ID NO: 36491 - DNA, 20 bp, synthetic construct
  misc_feature 1..20: note = Description of Artificial Sequence: Synthetic oligonucleotide
  misc_feature 1..20: note = Target: FXN; (+) strand; PAM type: YTN; PAM sequence: TTT
  source 1..20: mol_type = other DNA
ttttattcctgcttttgagg

SEQ ID NO: 36492 - DNA, 20 bp, synthetic construct
  misc_feature 1..20: note = Description of Artificial Sequence: Synthetic oligonucleotide
  misc_feature 1..20: note = Target: FXN; (+) strand; PAM type: YTN; PAM sequence: TTT
  source 1..20: mol_type = other DNA
tttattcctgcttttgagga

SEQ ID NO: 36493 - DNA, 20 bp, synthetic construct
  misc_feature 1..20: note = Description of Artificial Sequence: Synthetic oligonucleotide
  misc_feature 1..20: note = Target: FXN; (+) strand; PAM type: YTN; PAM sequence: TTT
  source 1..20: mol_type = other DNA
ttattcctgcttttgaggac

SEQ ID NO: 36494 - DNA, 20 bp, synthetic construct
  misc_feature 1..20: note = Description of Artificial Sequence: Synthetic oligonucleotide
  misc_feature 1..20: note = Target: FXN; (+) strand; PAM type: YTN; PAM sequence: TTT
  source 1..20: mol_type = other DNA
tattcctgcttttgaggaca

SEQ ID NO: 36495 - DNA, 20 bp, synthetic construct
  misc_feature 1..20: note = Description of Artificial Sequence: Synthetic oligonucleotide
  misc_feature 1..20: note = Target: FXN; (+) strand; PAM type: YTN; PAM sequence: TTT
  source 1..20: mol_type = other DNA
attcctgcttttgaggacag

SEQ ID NO: 36496 - DNA, 20 bp, synthetic construct
  misc_feature 1..20: note = Description of Artificial Sequence: Synthetic oligonucleotide
  misc_feature 1..20: note = Target: FXN; (+) strand; PAM type: YTN; PAM sequence: TTA
  source 1..20: mol_type = other DNA
ttcctgcttttgaggacagt

SEQ ID NO: 36497 - DNA, 20 bp, synthetic construct
  misc_feature 1..20: note = Description of Artificial Sequence: Synthetic oligonucleotide
  misc_feature 1..20: note = Target: FXN; (+) strand; PAM type: YTN; PAM sequence: TTC
  source 1..20: mol_type = other DNA
ctgcttttgaggacagttgg

SEQ ID NO: 36498 - DNA, 20 bp, synthetic construct
  misc_feature 1..20: note = Description of Artificial Sequence: Synthetic oligonucleotide
  misc_feature 1..20: note = Target: FXN; (+) strand; PAM type: YTN; PAM sequence: CTG
  source 1..20: mol_type = other DNA
cttttgaggacagttgggct

SEQ ID NO: 36499 - DNA, 20 bp, synthetic construct
  misc_feature 1..20: note = Description of Artificial Sequence: Synthetic oligonucleotide
  misc_feature 1..20: note = Target: FXN; (+) strand; PAM type: YTN; PAM sequence: CTT
  source 1..20: mol_type = other DNA
ttgaggacagttgggctatg

SEQ ID NO: 36500 - DNA, 20 bp, synthetic construct
  misc_feature 1..20: note = Description of Artificial Sequence: Synthetic oligonucleotide
  misc_feature 1..20: note = Target: FXN; (+) strand; PAM type: YTN; PAM sequence: TTT
  source 1..20: mol_type = other DNA
tgaggacagttgggctatgt

SEQ ID NO: 36501 - DNA, 20 bp, synthetic construct
  misc_feature 1..20: note = Description of Artificial Sequence: Synthetic oligonucleotide
  misc_feature 1..20: note = Target: FXN; (+) strand; PAM type: YTN; PAM sequence: TTT
  source 1..20: mol_type = other DNA
gaggacagttgggctatgtg

SEQ ID NO: 36502 - DNA, 20 bp, synthetic construct
  misc_feature 1..20: note = Description of Artificial Sequence: Synthetic oligonucleotide
  misc_feature 1..20: note = Target: FXN; (+) strand; PAM type: YTN; PAM sequence: TTG
  source 1..20: mol_type = other DNA
aggacagttgggctatgtgt

SEQ ID NO: 36503 - DNA, 20 bp, synthetic construct
  misc_feature 1..20: note = Description of Artificial Sequence: Synthetic oligonucleotide
  misc_feature 1..20: note = Target: FXN; (+) strand; PAM type: YTN; PAM sequence: TTG
  source 1..20: mol_type = other DNA
ggctatgtgtcacagctctg

SEQ ID NO: 36504 - DNA, 20 bp, synthetic construct
  misc_feature 1..20: note = Description of Artificial Sequence: Synthetic oligonucleotide
  misc_feature 1..20: note = Target: FXN; (+) strand; PAM type: YTN; PAM sequence: CTA
  source 1..20: mol_type = other DNA
tgtgtcacagctctgtagaa

SEQ ID NO: 36505 - DNA, 20 bp, synthetic construct
  misc_feature 1..20: note = Description of Artificial Sequence: Synthetic oligonucleotide
  misc_feature 1..20: note = Target: FXN; (+) strand; PAM type: YTN; PAM sequence: CTC
  source 1..20: mol_type = other DNA
tgtagaaagaatgtgttgcc

SEQ ID NO: 36506 - DNA, 20 bp, synthetic construct
  misc_feature 1..20: note = Description of Artificial Sequence: Synthetic oligonucleotide
  misc_feature 1..20: note = Target: FXN; (+) strand; PAM type: YTN; PAM sequence: CTG
  source 1..20: mol_type = other DNA
tagaaagaatgtgttgcctc

SEQ ID NO: 36507 - DNA, 20 bp, synthetic construct
  misc_feature 1..20: note = Description of Artificial Sequence: Synthetic oligonucleotide
  misc_feature 1..20: note = Target: FXN; (+) strand; PAM type: YTN; PAM sequence: TTG
  source 1..20: mol_type = other DNA
cctcctaccttgcccccaag

SEQ ID NO: 36508 - DNA, 20 bp, synthetic construct
  misc_feature 1..20: note = Description of Artificial Sequence: Synthetic oligonucleotide
  misc_feature 1..20: note = Target: FXN; (+) strand; PAM type: YTN; PAM sequence: CTC
  source 1..20: mol_type = other DNA
ctaccttgcccccaagttct

SEQ ID NO: 36509 - DNA, 20 bp, synthetic construct
  misc_feature 1..20: note = Description of Artificial Sequence: Synthetic oligonucleotide
  misc_feature 1..20: note = Target: FXN; (+) strand; PAM type: YTN; PAM sequence: CTA
  source 1..20: mol_type = other DNA
ccttgcccccaagttctgat

SEQ ID NO: 36510 - DNA, 20 bp, synthetic construct
  misc_feature 1..20: note = Description of Artificial Sequence: Synthetic oligonucleotide
  misc_feature 1..20: note = Target: FXN; (+) strand; PAM type: YTN; PAM sequence: CTT
  source 1..20: mol_type = other DNA
gcccccaagttctgattttt

SEQ ID NO: 36511 - DNA, 20 bp, synthetic construct
  misc_feature 1..20: note = Description of Artificial Sequence: Synthetic oligonucleotide
  misc_feature 1..20: note = Target: FXN; (+) strand; PAM type: YTN; PAM sequence: TTG
  source 1..20: mol_type = other DNA
cccccaagttctgattttta

SEQ ID NO: 36512 - DNA, 20 bp, synthetic construct
  misc_feature 1..20: note = Description of Artificial Sequence: Synthetic oligonucleotide
  misc_feature 1..20: note = Target: FXN; (+) strand; PAM type: YTN; PAM sequence: TTC
  source 1..20: mol_type = other DNA
tgatttttaatttctatgga

SEQ ID NO: 36513 - DNA, 20 bp, synthetic construct
  misc_feature 1..20: note = Description of Artificial Sequence: Synthetic oligonucleotide
  misc_feature 1..20: note = Target: FXN; (+) strand; PAM type: YTN; PAM sequence: CTG
  source 1..20: mol_type = other DNA
atttttaatttctatggaag

SEQ ID NO: 36514 - DNA, 20 bp, synthetic construct
  misc_feature 1..20: note = Description of Artificial Sequence: Synthetic oligonucleotide
  misc_feature 1..20: note = Target: FXN; (+) strand; PAM type: YTN; PAM sequence: TTT
  source 1..20: mol_type = other DNA
ttaatttctatggaagattt

SEQ ID NO: 36515 - DNA, 20 bp, synthetic construct
  misc_feature 1..20: note = Description of Artificial Sequence: Synthetic oligonucleotide
  misc_feature 1..20: note = Target: FXN; (+) strand; PAM type: YTN; PAM sequence: TTT
  source 1..20: mol_type = other DNA
taatttctatggaagatttt

SEQ ID NO: 36516 - DNA, 20 bp, synthetic construct
  misc_feature 1..20: note = Description of Artificial Sequence: Synthetic oligonucleotide
  misc_feature 1..20: note = Target: FXN; (+) strand; PAM type: YTN; PAM sequence: TTT
  source 1..20: mol_type = other DNA
aatttctatggaagattttt

SEQ ID NO: 36517 - DNA, 20 bp, synthetic construct
  misc_feature 1..20: note = Description of Artificial Sequence: Synthetic oligonucleotide
  misc_feature 1..20: note = Target: FXN; (+) strand; PAM type: YTN; PAM sequence: TTA
  source 1..20: mol_type = other DNA
atttctatggaagatttttt

SEQ ID NO: 36518 - DNA, 20 bp, synthetic construct
  misc_feature 1..20: note = Description of Artificial Sequence: Synthetic oligonucleotide
  misc_feature 1..20: note = Target: FXN; (+) strand; PAM type: YTN; PAM sequence: TTT
  source 1..20: mol_type = other DNA
ctatggaagattttttggat

SEQ ID NO: 36519 - DNA, 20 bp, synthetic construct
  misc_feature 1..20: note = Description of Artificial Sequence: Synthetic oligonucleotide
  misc_feature 1..20: note = Target: FXN; (+) strand; PAM type: YTN; PAM sequence: TTC
  source 1..20: mol_type = other DNA
tatggaagattttttggatt

SEQ ID NO: 36520 - DNA, 20 bp, synthetic construct
  misc_feature 1..20: note = Description of Artificial Sequence: Synthetic oligonucleotide
  misc_feature 1..20: note = Target: FXN; (+) strand; PAM type: YTN; PAM sequence: CTA
  source 1..20: mol_type = other DNA
tggaagattttttggattgt

SEQ ID NO: 36521 - DNA, 20 bp, synthetic construct
  misc_feature 1..20: note = Description of Artificial Sequence: Synthetic oligonucleotide
  misc_feature 1..20: note = Target: FXN; (+) strand; PAM type: YTN; PAM sequence: TTT
  source 1..20: mol_type = other DNA
tttggattgtcggatttcct

SEQ ID NO: 36522 - DNA, 20 bp, synthetic construct
  misc_feature 1..20: note = Description of Artificial Sequence: Synthetic oligonucleotide
  misc_feature 1..20: note = Target: FXN; (+) strand; PAM type: YTN; PAM sequence: TTT
  source 1..20: mol_type = other DNA
ttggattgtcggatttcctc

SEQ ID NO: 36523 - DNA, 20 bp, synthetic construct
  misc_feature 1..20: note = Description of Artificial Sequence: Synthetic oligonucleotide
  misc_feature 1..20: note = Target: FXN; (+) strand; PAM type: YTN; PAM sequence: TTT
  source 1..20: mol_type = other DNA
tggattgtcggatttcctcc

SEQ ID NO: 36524 - DNA, 20 bp, synthetic construct
  misc_feature 1..20: note = Description of Artificial Sequence: Synthetic oligonucleotide
  misc_feature 1..20: note = Target: FXN; (+) strand; PAM type: YTN; PAM sequence: TTT
  source 1..20: mol_type = other DNA
ggattgtcggatttcctccc

SEQ ID NO: 36525 - DNA, 20 bp, synthetic construct
  misc_feature 1..20: note = Description of Artificial Sequence: Synthetic oligonucleotide
  misc_feature 1..20: note = Target: FXN; (+) strand; PAM type: YTN; PAM sequence: TTG
  source 1..20: mol_type = other DNA
gattgtcggatttcctccct

SEQ ID NO: 36526 - DNA, 20 bp, synthetic construct
  misc_feature 1..20: note = Description of Artificial Sequence: Synthetic oligonucleotide
  misc_feature 1..20: note = Target: FXN; (+) strand; PAM type: YTN; PAM sequence: TTG
  source 1..20: mol_type = other DNA
tcggatttcctccctcacat

SEQ ID NO: 36527 - DNA, 20 bp, synthetic construct
  misc_feature 1..20: note = Description of Artificial Sequence: Synthetic oligonucleotide
  misc_feature 1..20: note = Target: FXN; (+) strand; PAM type: YTN; PAM sequence: TTT
  source 1..20: mol_type = other DNA
cctccctcacatgatacccc

SEQ ID NO: 36528 - DNA, 20 bp, synthetic construct
  misc_feature 1..20: note = Description of Artificial Sequence: Synthetic oligonucleotide
  misc_feature 1..20: note = Target: FXN; (+) strand; PAM type: YTN; PAM sequence: TTC
  source 1..20: mol_type = other DNA
ctccctcacatgatacccct

SEQ ID NO: 36529 - DNA, 20 bp, synthetic construct
  misc_feature 1..20: note = Description of Artificial Sequence: Synthetic oligonucleotide
  misc_feature 1..20: note = Target: FXN; (+) strand; PAM type: YTN; PAM sequence: CTC
  source 1..20: mol_type = other DNA
cctcacatgataccccttat

SEQ ID NO: 36530 - DNA, 20 bp, synthetic construct
  misc_feature 1..20: note = Description of Artificial Sequence: Synthetic oligonucleotide
  misc_feature 1..20: note = Target: FXN; (+) strand; PAM type: YTN; PAM sequence: CTC
  source 1..20: mol_type = other DNA
acatgataccccttatcttt

SEQ ID NO: 36531 - DNA, 20 bp, synthetic construct
  misc_feature 1..20: note = Description of Artificial Sequence: Synthetic oligonucleotide
  misc_feature 1..20: note = Target: FXN; (+) strand; PAM type: YTN; PAM sequence: CTT
  source 1..20: mol_type = other DNA
atcttttataatgtcttatg

SEQ ID NO: 36532 - DNA, 20 bp, synthetic construct
  misc_feature 1..20: note = Description of Artificial Sequence: Synthetic oligonucleotide
  misc_feature 1..20: note = Target: FXN; (+) strand; PAM type: YTN; PAM sequence: TTA
  source 1..20: mol_type = other DNA
tcttttataatgtcttatgc

SEQ ID NO: 36533 - DNA, 20 bp, synthetic construct
  misc_feature 1..20: note = Description of Artificial Sequence: Synthetic oligonucleotide
  misc_feature 1..20: note = Target: FXN; (+) strand; PAM type: YTN; PAM sequence: CTT
  source 1..20: mol_type = other DNA
ttataatgtcttatgcctat

SEQ ID NO: 36534 - DNA, 20 bp, synthetic construct
  misc_feature 1..20: note = Description of Artificial Sequence: Synthetic oligonucleotide
  misc_feature 1..20: note = Target: FXN; (+) strand; PAM type: YTN; PAM sequence: TTT
  source 1..20: mol_type = other DNA
tataatgtcttatgcctata

SEQ ID NO: 36535 - DNA, 20 bp, synthetic construct
  misc_feature 1..20: note = Description of Artificial Sequence: Synthetic oligonucleotide
  misc_feature 1..20: note = Target: FXN; (+) strand; PAM type: YTN; PAM sequence: TTT
  source 1..20: mol_type = other DNA
ataatgtcttatgcctatac

SEQ ID NO: 36536 - DNA, 20 bp, synthetic construct
  misc_feature 1..20: note = Description of Artificial Sequence: Synthetic oligonucleotide
  misc_feature 1..20: note = Target: FXN; (+) strand; PAM type: YTN; PAM sequence: TTA
  source 1..20: mol_type = other DNA
taatgtcttatgcctatacc

SEQ ID NO: 36537 - DNA, 20 bp, synthetic construct
  misc_feature 1..20: note = Description of Artificial Sequence: Synthetic oligonucleotide
  misc_feature 1..20: note = Target: FXN; (+) strand; PAM type: YTN; PAM sequence: CTT
  source 1..20: mol_type = other DNA
atgcctatacctgaatataa

SEQ ID NO: 36538 - DNA, 20 bp, synthetic construct
  misc_feature 1..20: note = Description of Artificial Sequence: Synthetic oligonucleotide
  misc_feature 1..20: note = Target: FXN; (+) strand; PAM type: YTN; PAM sequence: TTA
  source 1..20: mol_type = other DNA
tgcctatacctgaatataac

SEQ ID NO: 36539 - DNA, 20 bp, synthetic construct
  misc_feature 1..20: note = Description of Artificial Sequence: Synthetic oligonucleotide
  misc_feature 1..20: note = Target: FXN; (+) strand; PAM type: YTN; PAM sequence: CTA
  source 1..20: mol_type = other DNA
tacctgaatataacaacctt

SEQ ID NO: 36540 - DNA, 20 bp, synthetic construct
  misc_feature 1..20: note = Description of Artificial Sequence: Synthetic oligonucleotide
  misc_feature 1..20: note = Target: FXN; (+) strand; PAM type: YTN; PAM sequence: CTG
  source 1..20: mol_type = other DNA
aatataacaacctttaaaaa

SEQ ID NO: 36541 - DNA, 20 bp, synthetic construct
  misc_feature 1..20: note = Description of Artificial Sequence: Synthetic oligonucleotide
  misc_feature 1..20: note = Target: FXN; (+) strand; PAM type: YTN; PAM sequence: CTT
  source 1..20: mol_type = other DNA
taaaaaagcaaaataataag

SEQ ID NO: 36542 - DNA, 20 bp, synthetic construct
  misc_feature 1..20: note = Description of Artificial Sequence: Synthetic oligonucleotide
  misc_feature 1..20: note = Target: FXN; (+) strand; PAM type: YTN; PAM sequence: TTT
  source 1..20: mol_type = other DNA
aaaaaagcaaaataataaga

SEQ ID NO: 36543 - DNA, 20 bp, synthetic construct
  misc_feature 1..20: note = Description of Artificial Sequence: Synthetic oligonucleotide
  misc_feature 1..20: note = Target: FXN; (+) strand; PAM type: YTN; PAM sequence: TTA
  source 1..20: mol_type = other DNA
aaaaagcaaaataataagaa

SEQ ID NO: 36544 - DNA, 20 bp, synthetic construct
  misc_feature 1..20: note = Description of Artificial Sequence: Synthetic oligonucleotide
  misc_feature 1..20: note = Target: FXN; (+) strand; PAM type: YTN; PAM sequence: TTC
  source 1..20: mol_type = other DNA
caggagggaaaatgaattgt

SEQ ID NO: 36545 - DNA, 20 bp, synthetic construct
  misc_feature 1..20: note = Description of Artificial Sequence: Synthetic oligonucleotide
  misc_feature 1..20: note = Target: FXN; (+) strand; PAM type: YTN; PAM sequence: TTG
  source 1..20: mol_type = other DNA
tcttcactcttcattctttg

SEQ ID NO: 36546 - DNA, 20 bp, synthetic construct
  misc_feature 1..20: note = Description of Artificial Sequence: Synthetic oligonucleotide
  misc_feature 1..20: note = Target: FXN; (+) strand; PAM type: YTN; PAM sequence: CTT
  source 1..20: mol_type = other DNA
cactcttcattctttgaagg

SEQ ID NO: 36547 - DNA, 20 bp, synthetic construct
  misc_feature 1..20: note = Description of Artificial Sequence: Synthetic oligonucleotide
  misc_feature 1..20: note = Target: FXN; (+) strand; PAM type: YTN; PAM sequence: TTC
  source 1..20: mol_type = other DNA
actcttcattctttgaagga

SEQ ID NO: 36548 - DNA, 20 bp, synthetic construct
  misc_feature 1..20: note = Description of Artificial Sequence: Synthetic oligonucleotide
  misc_feature 1..20: note = Target: FXN; (+) strand; PAM type: YTN; PAM sequence: CTC
  source 1..20: mol_type = other DNA
ttcattctttgaaggattta

SEQ ID NO: 36549 - DNA, 20 bp, synthetic construct
  misc_feature 1..20: note = Description of Artificial Sequence: Synthetic oligonucleotide
  misc_feature 1..20: note = Target: FXN; (+) strand; PAM type: YTN; PAM sequence: CTT
  source 1..20: mol_type = other DNA
cattctttgaaggatttact

SEQ ID NO: 36550 - DNA, 20 bp, synthetic construct
  misc_feature 1..20: note = Description of Artificial Sequence: Synthetic oligonucleotide
  misc_feature 1..20: note = Target: FXN; (+) strand; PAM type: YTN; PAM sequence: TTC
  source 1..20: mol_type = other DNA
attctttgaaggatttactg

SEQ ID NO: 36551 - DNA, 20 bp, synthetic construct
  misc_feature 1..20: note = Description of Artificial Sequence: Synthetic oligonucleotide
  misc_feature 1..20: note = Target: FXN; (+) strand; PAM type: YTN; PAM sequence: TTC
  source 1..20: mol_type = other DNA
tttgaaggatttactgcaag

SEQ ID NO: 36552 - DNA, 20 bp, synthetic construct
  misc_feature 1..20: note = Description of Artificial Sequence: Synthetic oligonucleotide
  misc_feature 1..20: note = Target: FXN; (+) strand; PAM type: YTN; PAM sequence: CTT
  source 1..20: mol_type = other DNA
tgaaggatttactgcaagaa

SEQ ID NO: 36553 - DNA, 20 bp, synthetic construct
  misc_feature 1..20: note = Description of Artificial Sequence: Synthetic oligonucleotide
  misc_feature 1..20: note = Target: FXN; (+) strand; PAM type: YTN; PAM sequence: TTT
  source 1..20: mol_type = other DNA
gaaggatttactgcaagaag

SEQ ID NO: 36554 - DNA, 20 bp, synthetic construct
  misc_feature 1..20: note = Description of Artificial Sequence: Synthetic oligonucleotide
  misc_feature 1..20: note = Target: FXN; (+) strand; PAM type: YTN; PAM sequence: TTG
  source 1..20: mol_type = other DNA
aaggatttactgcaagaagt

SEQ ID NO: 36555 - DNA, 20 bp, synthetic construct
  misc_feature 1..20: note = Description of Artificial Sequence: Synthetic oligonucleotide
  misc_feature 1..20: note = Target: FXN; (+) strand; PAM type: YTN; PAM sequence: TTT
  source 1..20: mol_type = other DNA
actgcaagaagtacatgaag

SEQ ID NO: 36556 - DNA, 20 bp, synthetic construct
  misc_feature 1..20: note = Description of Artificial Sequence: Synthetic oligonucleotide
  misc_feature 1..20: note = Target: FXN; (+) strand; PAM type: YTN; PAM sequence: TTA
  source 1..20: mol_type = other DNA
ctgcaagaagtacatgaaga

SEQ ID NO: 36557 - DNA, 20 bp, synthetic construct
  misc_feature 1..20: note = Description of Artificial Sequence: Synthetic oligonucleotide
  misc_feature 1..20: note = Target: FXN; (+) strand; PAM type: YTN; PAM sequence: CTG
  source 1..20: mol_type = other DNA
caagaagtacatgaagagca

SEQ ID NO: 36558 - DNA, 20 bp, synthetic construct
  misc_feature 1..20: note = Description of Artificial Sequence: Synthetic oligonucleotide
  misc_feature 1..20: note = Target: FXN; (+) strand; PAM type: YTN; PAM sequence: CTG
  source 1..20: mol_type = other DNA
gtcaacctgctcactgttct

SEQ ID NO: 36559 - DNA, 20 bp, synthetic construct
  misc_feature 1..20: note = Description of Artificial Sequence: Synthetic oligonucleotide
  misc_feature 1..20: note = Target: FXN; (+) strand; PAM type: YTN; PAM sequence: CTG
  source 1..20: mol_type = other DNA
ctcactgttctatctccaaa

SEQ ID NO: 36560 - DNA, 20 bp, synthetic construct
  misc_feature 1..20: note = Description of Artificial Sequence: Synthetic oligonucleotide
  misc_feature 1..20: note = Target: FXN; (+) strand; PAM type: YTN; PAM sequence: CTC
  source 1..20: mol_type = other DNA
actgttctatctccaaatga

SEQ ID NO: 36561 - DNA, 20 bp, synthetic construct
  misc_feature 1..20: note = Description of Artificial Sequence: Synthetic oligonucleotide
  misc_feature 1..20: note = Target: FXN; (+) strand; PAM type: YTN; PAM sequence: CTG
  source 1..20: mol_type = other DNA
ttctatctccaaatgagaca

SEQ ID NO: 36562 - DNA, 20 bp, synthetic construct
  misc_feature 1..20: note = Description of Artificial Sequence: Synthetic oligonucleotide
  misc_feature 1..20: note = Target: FXN; (+) strand; PAM type: YTN; PAM sequence: TTC
  source 1..20: mol_type = other DNA
tatctccaaatgagacacat

SEQ ID NO: 36563 - DNA, 20 bp, synthetic construct
  misc_feature 1..20: note = Description of Artificial Sequence: Synthetic oligonucleotide
  misc_feature 1..20: note = Target: FXN; (+) strand; PAM type: YTN; PAM sequence: CTA
  source 1..20: mol_type = other DNA
tctccaaatgagacacatta

SEQ ID NO: 36564 - DNA, 20 bp, synthetic construct
  misc_feature 1..20: note = Description of Artificial Sequence: Synthetic oligonucleotide
  misc_feature 1..20: note = Target: FXN; (+) strand; PAM type: YTN; PAM sequence: CTC
  source 1..20: mol_type = other DNA
caaatgagacacattaaagg

SEQ ID NO: 36565 - DNA, 20 bp, synthetic construct
  misc_feature 1..20: note = Description of Artificial Sequence: Synthetic oligonucleotide
  misc_feature 1..20: note = Target: FXN; (+) strand; PAM type: YTN; PAM sequence: TTA
  source 1..20: mol_type = other DNA
aagggtagcctacaaatgtt

SEQ ID NO: 36566 - DNA, 20 bp, synthetic construct
  misc_feature 1..20: note = Description of Artificial Sequence: Synthetic oligonucleotide
  misc_feature 1..20: note = Target: FXN; (+) strand; PAM type: YTN; PAM sequence: CTA
  source 1..20: mol_type = other DNA
caaatgttttcaggcttctt

SEQ ID NO: 36567 - DNA, 20 bp, synthetic construct
  misc_feature 1..20: note = Description of Artificial Sequence: Synthetic oligonucleotide
  misc_feature 1..20: note = Target: FXN; (+) strand; PAM type: YTN; PAM sequence: TTT
  source 1..20: mol_type = other DNA
tcaggcttctttcaaagtgt

SEQ ID NO: 36568 - DNA, 20 bp, synthetic construct
  misc_feature 1..20: note = Description of Artificial Sequence: Synthetic oligonucleotide
  misc_feature 1..20: note = Target: FXN; (+) strand; PAM type: YTN; PAM sequence: TTT
  source 1..20: mol_type = other DNA
caggcttctttcaaagtgta

SEQ ID NO: 36569 - DNA, 20 bp, synthetic construct
  misc_feature 1..20: note = Description of Artificial Sequence: Synthetic oligonucleotide
  misc_feature 1..20: note = Target: FXN; (+) strand; PAM type: YTN; PAM sequence: TTC
  source 1..20: mol_type = other DNA
aggcttctttcaaagtgtaa

SEQ ID NO: 36570 - DNA, 20 bp, synthetic construct
  misc_feature 1..20: note = Description of Artificial Sequence: Synthetic oligonucleotide
  misc_feature 1..20: note = Target: FXN; (+) strand; PAM type: YTN; PAM sequence: CTT
  source 1..20: mol_type = other DNA
ctttcaaagtgtaagcactt

SEQ ID NO: 36571 - DNA, 20 bp, synthetic construct
  misc_feature 1..20: note = Description of Artificial Sequence: Synthetic oligonucleotide
  misc_feature 1..20: note = Target: FXN; (+) strand; PAM type: YTN; PAM sequence: TTC
  source 1..20: mol_type = other DNA
tttcaaagtgtaagcacttc

SEQ ID NO: 36572 - DNA, 20 bp, synthetic construct
  misc_feature 1..20: note = Description of Artificial Sequence: Synthetic oligonucleotide
  misc_feature 1..20: note = Target: FXN; (+) strand; PAM type: YTN; PAM sequence: CTT
  source 1..20: mol_type = other DNA
tcaaagtgtaagcacttctg

SEQ ID NO: 36573 - DNA, 20 bp, synthetic construct
  misc_feature 1..20: note = Description of Artificial Sequence: Synthetic oligonucleotide
  misc_feature 1..20: note = Target: FXN; (+) strand; PAM type: YTN; PAM sequence: TTT
  source 1..20: mol_type = other DNA
caaagtgtaagcacttctga

SEQ ID NO: 36574 - DNA, 20 bp, synthetic construct
  misc_feature 1..20: note = Description of Artificial Sequence: Synthetic oligonucleotide
  misc_feature 1..20: note = Target: FXN; (+) strand; PAM type: YTN; PAM sequence: TTC
  source 1..20: mol_type = other DNA
aaagtgtaagcacttctgag

SEQ ID NO: 36575 - DNA, 20 bp, synthetic construct
  misc_feature 1..20: note = Description of Artificial Sequence: Synthetic oligonucleotide
  misc_feature 1..20: note = Target: FXN; (+) strand; PAM type: YTN; PAM sequence: CTT
  source 1..20: mol_type = other DNA
ctgagctctttagcattgaa

SEQ ID NO: 36576 - DNA, 20 bp, synthetic construct
  misc_feature 1..20: note = Description of Artificial Sequence: Synthetic oligonucleotide
  misc_feature 1..20: note = Target: FXN; (+) strand; PAM type: YTN; PAM sequence: TTC
  source 1..20: mol_type = other DNA
tgagctctttagcattgaag

SEQ ID NO: 36577 - DNA, 20 bp, synthetic construct
  misc_feature 1..20: note = Description of Artificial Sequence: Synthetic oligonucleotide
  misc_feature 1..20: note = Target: FXN; (+) strand; PAM type: YTN; PAM sequence: CTG
  source 1..20: mol_type = other DNA
agctctttagcattgaagtg

SEQ ID NO: 36578 - DNA, 20 bp, synthetic construct
  misc_feature 1..20: note = Description of Artificial Sequence: Synthetic oligonucleotide
  misc_feature 1..20: note = Target: FXN; (+) strand; PAM type: YTN; PAM sequence: CTC
  source 1..20: mol_type = other DNA
tttagcattgaagtgtcgaa

SEQ ID NO: 36579 - DNA, 20 bp, synthetic construct
  misc_feature 1..20: note = Description of Artificial Sequence: Synthetic oligonucleotide
  misc_feature 1..20: note = Target: FXN; (+) strand; PAM type: YTN; PAM sequence: CTT
  source 1..20: mol_type = other DNA
tagcattgaagtgtcgaaag

SEQ ID NO: 36580 - DNA, 20 bp, synthetic construct
  misc_feature 1..20: note = Description of Artificial Sequence: Synthetic oligonucleotide
  misc_feature 1..20: note = Target: FXN; (+) strand; PAM type: YTN; PAM sequence: TTT
  source 1..20: mol_type = other DNA
agcattgaagtgtcgaaagc

SEQ ID NO: 36581 - DNA, 20 bp, synthetic construct
  misc_feature 1..20: note = Description of Artificial Sequence: Synthetic oligonucleotide
  misc_feature 1..20: note = Target: FXN; (+) strand; PAM type: YTN; PAM sequence: TTA
  source 1..20: mol_type = other DNA
gcattgaagtgtcgaaagca

SEQ ID NO: 36582 - DNA, 20 bp, synthetic construct
  misc_feature 1..20: note = Description of Artificial Sequence: Synthetic oligonucleotide
  misc_feature 1..20: note = Target: FXN; (+) strand; PAM type: YTN; PAM sequence: TTG
  source 1..20: mol_type = other DNA
aagtgtcgaaagcaactcac

SEQ ID NO: 36583 - DNA, 20 bp, synthetic construct
  misc_feature 1..20: note = Description of Artificial Sequence: Synthetic oligonucleotide
  misc_feature 1..20: note = Target: FXN; (+) strand; PAM type: YTN; PAM sequence: CTC
  source 1..20: mol_type = other DNA
acacgggaagatcatttctt

SEQ ID NO: 36584 - DNA, 20 bp, synthetic construct
  misc_feature 1..20: note = Description of Artificial Sequence: Synthetic oligonucleotide
  misc_feature 1..20: note = Target: FXN; (+) strand; PAM type: YTN; PAM sequence: TTT
  source 1..20: mol_type = other DNA
cttatttgtgctctgtgact

SEQ ID NO: 36585 - DNA, 20 bp, synthetic construct
  misc_feature 1..20: note = Description of Artificial Sequence: Synthetic oligonucleotide
  misc_feature 1..20: note = Target: FXN; (+) strand; PAM type: YTN; PAM sequence: TTC
  source 1..20: mol_type = other DNA
ttatttgtgctctgtgactg

SEQ ID NO: 36586 - DNA, 20 bp, synthetic construct
  misc_feature 1..20: note = Description of Artificial Sequence: Synthetic oligonucleotide
  misc_feature 1..20: note = Target: FXN; (+) strand; PAM type: YTN; PAM sequence: CTT
  source 1..20: mol_type = other DNA
atttgtgctctgtgactgcc

SEQ ID NO: 36587 - DNA, 20 bp, synthetic construct
  misc_feature 1..20: note = Description of Artificial Sequence: Synthetic oligonucleotide
  misc_feature 1..20: note = Target: FXN; (+) strand; PAM type: YTN; PAM sequence: TTA
  source 1..20: mol_type = other DNA
tttgtgctctgtgactgcca

SEQ ID NO: 36588 - DNA, 20 bp, synthetic construct
  misc_feature 1..20: note = Description of Artificial Sequence: Synthetic oligonucleotide
  misc_feature 1..20: note = Target: FXN; (+) strand; PAM type: YTN; PAM sequence: TTT
  source 1..20: mol_type = other DNA
gtgctctgtgactgccaagg

SEQ ID NO: 36589 - DNA, 20 bp, synthetic construct
  misc_feature 1..20: note = Description of Artificial Sequence: Synthetic oligonucleotide
  misc_feature 1..20: note = Target: FXN; (+) strand; PAM type: YTN; PAM sequence: TTG
  source 1..20: mol_type = other DNA
tgctctgtgactgccaaggt

SEQ ID NO: 36590 - DNA, 20 bp, synthetic construct
  misc_feature 1..20: note = Description of Artificial Sequence: Synthetic oligonucleotide
  misc_feature 1..20: note = Target: FXN; (+) strand; PAM type: YTN; PAM sequence: CTC
  source 1..20: mol_type = other DNA
tgtgactgccaaggtgtggc

SEQ ID NO: 36591 - DNA, 20 bp, synthetic construct
  misc_feature 1..20: note = Description of Artificial Sequence: Synthetic oligonucleotide
  misc_feature 1..20: note = Target: FXN; (+) strand; PAM type: YTN; PAM sequence: CTG
  source 1..20: mol_type = other DNA
tgactgccaaggtgtggcct

SEQ ID NO: 36592 - DNA, 20 bp, synthetic construct
  misc_feature 1..20: note = Description of Artificial Sequence: Synthetic oligonucleotide
  misc_feature 1..20: note = Target: FXN; (+) strand; PAM type: YTN; PAM sequence: CTG
  source 1..20: mol_type = other DNA
ccaaggtgtggcctgcactg

SEQ ID NO: 36593 - DNA, 20 bp, synthetic construct
  misc_feature 1..20: note = Description of Artificial Sequence: Synthetic oligonucleotide
  misc_feature 1..20: note = Target: FXN; (+) strand; PAM type: YTN; PAM sequence: CTG
  source 1..20: mol_type = other DNA
cactgggttgtccagggaga

SEQ ID NO: 36594 - DNA, 20 bp, synthetic construct
  misc_feature 1..20: note = Description of Artificial Sequence: Synthetic oligonucleotide
  misc_feature 1..20: note = Target: FXN; (+) strand; PAM type: YTN; PAM sequence: CTG
  source 1..20: mol_type = other DNA
ggttgtccagggagacctag

SEQ ID NO: 36595 - DNA, 20 bp, synthetic construct
  misc_feature 1..20: note = Description of Artificial Sequence: Synthetic oligonucleotide
  misc_feature 1..20: note = Target: FXN; (+) strand; PAM type: YTN; PAM sequence: TTG
  source 1..20: mol_type = other DNA
tccagggagacctagtgctg

SEQ ID NO: 36596 - DNA, 20 bp, synthetic construct
  misc_feature 1..20: note = Description of Artificial Sequence: Synthetic oligonucleotide
  misc_feature 1..20: note = Target: FXN; (+) strand; PAM type: YTN; PAM sequence: CTA
  source 1..20: mol_type = other DNA
gtgctgtttctcccacatat

SEQ ID NO: 36597 - DNA, 20 bp, synthetic construct
  misc_feature 1..20: note = Description of Artificial Sequence: Synthetic oligonucleotide
  misc_feature 1..20: note = Target: FXN; (+) strand; PAM type: YTN; PAM sequence: CTG
  source 1..20: mol_type = other DNA
tttctcccacatattcacat

SEQ ID NO: 36598 - DNA, 20 bp, synthetic construct
  misc_feature 1..20: note = Description of Artificial Sequence: Synthetic oligonucleotide
  misc_feature 1..20: note = Target: FXN; (+) strand; PAM type: YTN; PAM sequence: TTT
  source 1..20: mol_type = other DNA
ctcccacatattcacatacg

SEQ ID NO: 36599 - DNA, 20 bp, synthetic construct
  misc_feature 1..20: note = Description of Artificial Sequence: Synthetic oligonucleotide
  misc_feature 1..20: note = Target: FXN; (+) strand; PAM type: YTN; PAM sequence: TTC
  source 1..20: mol_type = other DNA
tcccacatattcacatacgt

SEQ ID NO: 36600 - DNA, 20 bp, synthetic construct
  misc_feature 1..20: note = Description of Artificial Sequence: Synthetic oligonucleotide
  misc_feature 1..20: note = Target: FXN; (+) strand; PAM type: YTN; PAM sequence: CTC
  source 1..20: mol_type = other DNA
ccacatattcacatacgtgt

SEQ ID NO: 36601 - DNA, 20 bp, synthetic construct
  misc_feature 1..20: note = Description of Artificial Sequence: Synthetic oligonucleotide
  misc_feature 1..20: note = Target: FXN; (+) strand; PAM type: YTN; PAM sequence: TTC
  source 1..20: mol_type = other DNA
acatacgtgtctgtgtgtat

SEQ ID NO: 36602 - DNA, 20 bp, synthetic construct
  misc_feature 1..20: note = Description of Artificial Sequence: Synthetic oligonucleotide
  misc_feature 1..20: note = Target: FXN; (+) strand; PAM type: YTN; PAM sequence: CTG
  source 1..20: mol_type = other DNA
tgtgtatatatattttttca

SEQ ID NO: 36603 - DNA, 20 bp, synthetic construct
  misc_feature 1..20: note = Description of Artificial Sequence: Synthetic oligonucleotide
  misc_feature 1..20: note = Target: FXN; (+) strand; PAM type: YTN; PAM sequence: TTT
  source 1..20: mol_type = other DNA
tttcaatttaaaggttagta

SEQ ID NO: 36604 - DNA, 20 bp, synthetic construct
  misc_feature 1..20: note = Description of Artificial Sequence: Synthetic oligonucleotide
  misc_feature 1..20: note = Target: FXN; (+) strand; PAM type: YTN; PAM sequence: TTT
  source 1..20: mol_type = other DNA
ttcaatttaaaggttagtat

SEQ ID NO: 36605 - DNA, 20 bp, synthetic construct
  misc_feature 1..20: note = Description of Artificial Sequence: Synthetic oligonucleotide
  misc_feature 1..20: note = Target: FXN; (+) strand; PAM type: YTN; PAM sequence: TTT
  source 1..20: mol_type = other DNA
tcaatttaaaggttagtatg

SEQ ID NO: 36606 - DNA, 20 bp, synthetic construct
  misc_feature 1..20: note = Description of Artificial Sequence: Synthetic oligonucleotide
  misc_feature 1..20: note = Target: FXN; (+) strand; PAM type: YTN; PAM sequence: TTT
  source 1..20: mol_type = other DNA
caatttaaaggttagtatgg

SEQ ID NO: 36607 - DNA, 20 bp, synthetic construct
  misc_feature 1..20: note = Description of Artificial Sequence: Synthetic oligonucleotide
  misc_feature 1..20: note = Target: FXN; (+) strand; PAM type: YTN; PAM sequence: TTC
  source 1..20: mol_type = other DNA
aatttaaaggttagtatgga

SEQ ID NO: 36608 - DNA, 20 bp, synthetic construct
  misc_feature 1..20: note = Description of Artificial Sequence: Synthetic oligonucleotide
  misc_feature 1..20: note = Target: FXN; (+) strand; PAM type: YTN; PAM sequence: TTT
  source 1..20: mol_type = other DNA
aaaggttagtatggaatcag

SEQ ID NO: 36609 - DNA, 20 bp, synthetic construct
  misc_feature 1..20: note = Description of Artificial Sequence: Synthetic oligonucleotide
  misc_feature 1..20: note = Target: FXN; (+) strand; PAM type: YTN; PAM sequence: TTA
  source 1..20: mol_type = other DNA
aaggttagtatggaatcagc

SEQ ID NO: 36610 - DNA, 20 bp, synthetic construct
  misc_feature 1..20: note = Description of Artificial Sequence: Synthetic oligonucleotide
  misc_feature 1..20: note = Target: FXN; (+) strand; PAM type: YTN; PAM sequence: TTA
  source 1..20: mol_type = other DNA
gtatggaatcagctgctaca

SEQ ID NO: 36611 - DNA, 20 bp, synthetic construct
  misc_feature 1..20: note = Description of Artificial Sequence: Synthetic oligonucleotide
  misc_feature 1..20: note = Target: FXN; (+) strand; PAM type: YTN; PAM sequence: CTG
  source 1..20: mol_type = other DNA
ctacaagaatgcaaaaaatc

SEQ ID NO: 36612 - DNA, 20 bp, synthetic construct
  misc_feature 1..20: note = Description of Artificial Sequence: Synthetic oligonucleotide
  misc_feature 1..20: note = Target: FXN; (+) strand; PAM type: YTN; PAM sequence: CTA
  source 1..20: mol_type = other DNA
caagaatgcaaaaaatcttc

SEQ ID NO: 36613 - DNA, 20 bp, synthetic construct
  misc_feature 1..20: note = Description of Artificial Sequence: Synthetic oligonucleotide
  misc_feature 1..20: note = Target: FXN; (+) strand; PAM type: YTN; PAM sequence: CTT
  source 1..20: mol_type = other DNA
ccaaagacaagaaaagagga

SEQ ID NO: 36614 - DNA, 20 bp, synthetic construct
  misc_feature 1..20: note = Description of Artificial Sequence: Synthetic oligonucleotide
  misc_feature 1..20: note = Target: FXN; (+) strand; PAM type: YTN; PAM sequence: TTC
  source 1..20: mol_type = other DNA
caaagacaagaaaagaggaa

SEQ ID NO: 36615 - DNA, 20 bp, synthetic construct
  misc_feature 1..20: note = Description of Artificial Sequence: Synthetic oligonucleotide
  misc_feature 1..20: note = Target: FXN; (+) strand; PAM type: YTN; PAM sequence: TTT
  source 1..20: mol_type = other DNA
tcatgagctgagtgatgtag

SEQ ID NO: 36616 - DNA, 20 bp, synthetic construct
  misc_feature 1..20: note = Description of Artificial Sequence: Synthetic oligonucleotide
  misc_feature 1..20: note = Target: FXN; (+) strand; PAM type: YTN; PAM sequence: TTT
  source 1..20: mol_type = other DNA
catgagctgagtgatgtagc

SEQ ID NO: 36617 - DNA, 20 bp, synthetic construct
  misc_feature 1..20: note = Description of Artificial Sequence: Synthetic oligonucleotide
  misc_feature 1..20: note = Target: FXN; (+) strand; PAM type: YTN; PAM sequence: TTC
  source 1..20: mol_type = other DNA
atgagctgagtgatgtagcg

SEQ ID NO: 36618 - DNA, 20 bp, synthetic construct
  misc_feature 1..20: note = Description of Artificial Sequence: Synthetic oligonucleotide
  misc_feature 1..20: note = Target: FXN; (+) strand; PAM type: YTN; PAM sequence: CTG
  source 1..20: mol_type = other DNA
agtgatgtagcgtaacaaac

SEQ ID NO: 36619 - DNA, 20 bp, synthetic construct
  misc_feature 1..20: note = Description of Artificial Sequence: Synthetic oligonucleotide
  misc_feature 1..20: note = Target: FXN; (+) strand; PAM type: YTN; PAM sequence: CTG
  source 1..20: mol_type = other DNA
aggaggtgccttgtaaacat

SEQ ID NO: 36620 - DNA, 20 bp, synthetic construct
  misc_feature 1..20: note = Description of Artificial Sequence: Synthetic oligonucleotide
  misc_feature 1..20: note = Target: FXN; (+) strand; PAM type: YTN; PAM sequence: CTT
  source 1..20: mol_type = other DNA
gtaaacatgaaggggcagat

SEQ ID NO: 36621 - DNA, 20 bp, synthetic construct
  misc_feature 1..20: note = Description of Artificial Sequence: Synthetic oligonucleotide
  misc_feature 1..20: note = Target: FXN; (+) strand; PAM type: YTN; PAM sequence: TTG
  source 1..20: mol_type = other DNA
taaacatgaaggggcagata

SEQ ID NO: 36622 - DNA, 20 bp, synthetic construct
  misc_feature 1..20: note = Description of Artificial Sequence: Synthetic oligonucleotide
  misc_feature 1..20: note = Target: FXN; (+) strand; PAM type: YTN; PAM sequence: CTC
  source 1..20: mol_type = other DNA
atgttgataaagagagccct

SEQ ID NO: 36623 - DNA, 20 bp, synthetic construct
  misc_feature 1..20: note = Description of Artificial Sequence: Synthetic oligonucleotide
  misc_feature 1..20: note = Target: FXN; (+) strand; PAM type: YTN; PAM sequence: TTG
  source 1..20: mol_type = other DNA
ataaagagagccctggtcct

SEQ ID NO: 36624 - DNA, 20 bp, synthetic construct
  misc_feature 1..20: note = Description of Artificial Sequence: Synthetic oligonucleotide
  misc_feature 1..20: note = Target: FXN; (+) strand; PAM type: YTN; PAM sequence: CTG
  source 1..20: mol_type = other DNA
gtcctagacatagttcagcc

SEQ ID NO: 36625 - DNA, 20 bp, synthetic construct
  misc_feature 1..20: note = Description of Artificial Sequence: Synthetic oligonucleotide
  misc_feature 1..20: note = Target: FXN; (+) strand; PAM type: YTN; PAM sequence: CTA
  source 1..20: mol_type = other DNA
gacatagttcagccacaaag

SEQ ID NO: 36626 - DNA, 20 bp, synthetic construct
  misc_feature 1..20: note = Description of Artificial Sequence: Synthetic oligonucleotide
  misc_feature 1..20: note = Target: FXN; (+) strand; PAM type: YTN; PAM sequence: TTC
  source 1..20: mol_type = other DNA
agccacaaagtagttgtccc

SEQ ID NO: 36627 - DNA, 20 bp, synthetic construct
  misc_feature 1..20: note = Description of Artificial Sequence: Synthetic oligonucleotide
  misc_feature 1..20: note = Target: FXN; (+) strand; PAM type: YTN; PAM sequence: TTG
  source 1..20: mol_type = other DNA
tccctttgtggacaagtttc

SEQ ID NO: 36628 - DNA, 20 bp, synthetic construct
  misc_feature 1..20: note = Description of Artificial Sequence: Synthetic oligonucleotide
  misc_feature 1..20: note = Target: FXN; (+) strand; PAM type: YTN; PAM sequence: CTT
  source 1..20: mol_type = other DNA
tgtggacaagtttcccaaat

SEQ ID NO: 36629 - DNA, 20 bp, synthetic construct
  misc_feature 1..20: note = Description of Artificial Sequence: Synthetic oligonucleotide
  misc_feature 1..20: note = Target: FXN; (+) strand; PAM type: YTN; PAM sequence: TTT
  source 1..20: mol_type = other DNA
gtggacaagtttcccaaatt

SEQ ID NO: 36630 - DNA, 20 bp, synthetic construct
  misc_feature 1..20: note = Description of Artificial Sequence: Synthetic oligonucleotide
  misc_feature 1..20: note = Target: FXN; (+) strand; PAM type: YTN; PAM sequence: TTG
  source 1..20: mol_type = other DNA
tggacaagtttcccaaattc

SEQ ID NO: 36631 - DNA, 20 bp, synthetic construct
  misc_feature 1..20: note = Description of Artificial Sequence: Synthetic oligonucleotide
  misc_feature 1..20: note = Target: FXN; (+) strand; PAM type: YTN; PAM sequence: TTT
  source 1..20: mol_type = other DNA
cccaaattccctggacctct

SEQ ID NO: 36632 - DNA, 20 bp, synthetic construct
  misc_feature 1..20: note = Description of Artificial Sequence: Synthetic oligonucleotide
  misc_feature 1..20: note = Target: FXN; (+) strand; PAM type: YTN; PAM sequence: TTC
  source 1..20: mol_type = other DNA
ccaaattccctggacctctg

SEQ ID NO: 36633 - DNA, 20 bp, synthetic construct
  misc_feature 1..20: note = Description of Artificial Sequence: Synthetic oligonucleotide
  misc_feature 1..20: note = Target: FXN; (+) strand; PAM type: YTN; PAM sequence: TTC
  source 1..20: mol_type = other DNA
cctggacctctgcttcccca

SEQ ID NO: 36634 - DNA, 20 bp, synthetic construct
  misc_feature 1..20: note = Description of Artificial Sequence: Synthetic oligonucleotide
  misc_feature 1..20: note = Target: FXN; (+) strand; PAM type: YTN; PAM sequence: CTG
  source 1..20: mol_type = other DNA
gacctctgcttccccatctg

SEQ ID NO: 36635 - DNA, 20 bp, synthetic construct
  misc_feature 1..20: note = Description of Artificial Sequence: Synthetic oligonucleotide
  misc_feature 1..20: note = Target: FXN; (+) strand; PAM type: YTN; PAM sequence: CTC
  source 1..20: mol_type = other DNA
tgcttccccatctgttaaat

SEQ ID NO: 36636 - DNA, 20 bp, synthetic construct
  misc_feature 1..20: note = Description of Artificial Sequence: Synthetic oligonucleotide
  misc_feature 1..20: note = Target: FXN; (+) strand; PAM type: YTN; PAM sequence: CTG
  source 1..20: mol_type = other DNA
cttccccatctgttaaatga

SEQ ID NO: 36637 - DNA, 20 bp, synthetic construct
  misc_feature 1..20: note = Description of Artificial Sequence: Synthetic oligonucleotide
  misc_feature 1..20: note = Target: FXN; (+) strand; PAM type: YTN; PAM sequence: CTT
  source 1..20: mol_type = other DNA
ccccatctgttaaatgagag

SEQ ID NO: 36638 - DNA, 20 bp, synthetic construct
  misc_feature 1..20: note = Description of Artificial Sequence: Synthetic oligonucleotide
  misc_feature 1..20: note = Target: FXN; (+) strand; PAM type: YTN; PAM sequence: TTC
  source 1..20: mol_type = other DNA
cccatctgttaaatgagaga

SEQ ID NO: 36639 - DNA, 20 bp, synthetic construct
  misc_feature 1..20: note = Description of Artificial Sequence: Synthetic oligonucleotide
  misc_feature 1..20: note = Target: FXN; (+) strand; PAM type: YTN; PAM sequence: CTG
  source 1..20: mol_type = other DNA
ttaaatgagagaatagagta

SEQ ID NO: 36640 - DNA, 20 bp, synthetic construct
  misc_feature 1..20: note = Description of Artificial Sequence: Synthetic oligonucleotide
  misc_feature 1..20: note = Target: FXN; (+) strand; PAM type: YTN; PAM sequence: TTA
  source 1..20: mol_type = other DNA
aatgagagaatagagtatgg

SEQ ID NO: 36641 - DNA, 20 bp, synthetic construct
  misc_feature 1..20: note = Description of Artificial Sequence: Synthetic oligonucleotide
  misc_feature 1..20: note = Target: FXN; (+) strand; PAM type: YTN; PAM sequence: TTG
  source 1..20: mol_type = other DNA
attcccagcattcagtggtc

SEQ ID NO: 36642 - DNA, 20 bp, synthetic construct
  misc_feature 1..20: note = Description of Artificial Sequence: Synthetic oligonucleotide
  misc_feature 1..20: note = Target: FXN; (+) strand; PAM type: YTN; PAM sequence: TTC
  source 1..20: mol_type = other DNA
ccagcattcagtggtcctgt

SEQ ID NO: 36643 - DNA, 20 bp, synthetic construct
  misc_feature 1..20: note = Description of Artificial Sequence: Synthetic oligonucleotide
  misc_feature 1..20: note = Target: FXN; (+) strand; PAM type: YTN; PAM sequence: TTC
  source 1..20: mol_type = other DNA
agtggtcctgtcaagcaacc

SEQ ID NO: 36644 - DNA, 20 bp, synthetic construct
  misc_feature 1..20: note = Description of Artificial Sequence: Synthetic oligonucleotide
  misc_feature 1..20: note = Target: FXN; (+) strand; PAM type: YTN; PAM sequence: CTG
  source 1..20: mol_type = other DNA
tcaagcaacctaacaggcta

SEQ ID NO: 36645 - DNA, 20 bp, synthetic construct
  misc_feature 1..20: note = Description of Artificial Sequence: Synthetic oligonucleotide
  misc_feature 1..20: note = Target: FXN; (+) strand; PAM type: YTN; PAM sequence: CTA
  source 1..20: mol_type = other DNA
acaggctagttctaattccc

SEQ ID NO: 36646 - DNA, 20 bp, synthetic construct
  misc_feature 1..20: note = Description of Artificial Sequence: Synthetic oligonucleotide
  misc_feature 1..20: note = Target: FXN; (+) strand; PAM type: YTN; PAM sequence: CTA
  source 1..20: mol_type = other DNA
gttctaattccctattgggt

SEQ ID NO: 36647 - DNA, 20 bp, synthetic construct
  misc_feature 1..20: note = Description of Artificial Sequence: Synthetic oligonucleotide
  misc_feature 1..20: note = Target: FXN; (+) strand; PAM type: YTN; PAM sequence: TTC
  source 1..20: mol_type = other DNA
taattccctattgggtagat

SEQ ID NO: 36648 - DNA, 20 bp, synthetic construct
  misc_feature 1..20: note = Description of Artificial Sequence: Synthetic oligonucleotide
  misc_feature 1..20: note = Target: FXN; (+) strand; PAM type: YTN; PAM sequence: CTA
  source 1..20: mol_type = other DNA
attccctattgggtagatga

SEQ ID NO: 36649 - DNA, 20 bp, synthetic construct
  misc_feature 1..20: note = Description of Artificial Sequence: Synthetic oligonucleotide
  misc_feature 1..20: note = Target: FXN; (+) strand; PAM type: YTN; PAM sequence: TTC
  source 1..20: mol_type = other DNA
cctattgggtagatgagggg

SEQ ID NO: 36650 - DNA, 20 bp, synthetic construct
  misc_feature 1..20: note = Description of Artificial Sequence: Synthetic oligonucleotide
  misc_feature 1..20: note = Target: FXN; (+) strand; PAM type: YTN; PAM sequence: CTA
  source 1..20: mol_type = other DNA
ttgggtagatgaggggatga

SEQ ID NO: 36651 - DNA, 20 bp, synthetic construct
  misc_feature 1..20: note = Description of Artificial Sequence: Synthetic oligonucleotide
  misc_feature 1..20: note = Target: FXN; (+) strand; PAM type: YTN; PAM sequence: TTG
  source 1..20: mol_type = other DNA
ggtagatgaggggatgacaa

SEQ ID NO: 36652 - DNA, 20 bp, synthetic construct
  misc_feature 1..20: note = Description of Artificial Sequence: Synthetic oligonucleotide
  misc_feature 1..20: note = Target: FXN; (+) strand; PAM type: YTN; PAM sequence: TTT
  source 1..20: mol_type = other DNA
ttaagctatataggaaacat

SEQ ID NO: 36653 - DNA, 20 bp, synthetic construct
  misc_feature 1..20: note = Description of Artificial Sequence: Synthetic oligonucleotide
  misc_feature 1..20: note = Target: FXN; (+) strand; PAM type: YTN; PAM sequence: TTT
  source 1..20: mol_type = other DNA
taagctatataggaaacatt

SEQ ID NO: 36654 - DNA, 20 bp, synthetic construct
  misc_feature 1..20: note = Description of Artificial Sequence: Synthetic oligonucleotide
  misc_feature 1..20: note = Target: FXN; (+) strand; PAM type: YTN; PAM sequence: TTT
  source 1..20: mol_type = other DNA
aagctatataggaaacattg

SEQ ID NO: 36655 - DNA, 20 bp, synthetic construct
  misc_feature 1..20: note = Description of Artificial Sequence: Synthetic oligonucleotide
  misc_feature 1..20: note = Target: FXN; (+) strand; PAM type: YTN; PAM sequence: TTA
  source 1..20: mol_type = other DNA
agctatataggaaacattgt

SEQ ID NO: 36656 - DNA, 20 bp, synthetic construct
  misc_feature 1..20: note = Description of Artificial Sequence: Synthetic oligonucleotide
  misc_feature 1..20: note = Target: FXN; (+) strand; PAM type: YTN; PAM sequence: CTA
  source 1..20: mol_type = other DNA
tataggaaacattgttattg

SEQ ID NO: 36657 - DNA, 20 bp, synthetic construct
  misc_feature 1..20: note = Description of Artificial Sequence: Synthetic oligonucleotide
  misc_feature 1..20: note = Target: FXN; (+) strand; PAM type: YTN; PAM sequence: TTG
  source 1..20: mol_type = other DNA
ttattggtgttgccctatcg

SEQ ID NO: 36658 - DNA, 20 bp, synthetic construct
  misc_feature 1..20: note = Description of Artificial Sequence: Synthetic oligonucleotide
  misc_feature 1..20: note = Target: FXN; (+) strand; PAM type: YTN; PAM sequence: TTA
  source 1..20: mol_type = other DNA
ttggtgttgccctatcgtga

SEQ ID NO: 36659 - DNA, 20 bp, synthetic construct
  misc_feature 1..20: note = Description of Artificial Sequence: Synthetic oligonucleotide
  misc_feature 1..20: note = Target: FXN; (+) strand; PAM type: YTN; PAM sequence: TTG
  source 1..20: mol_type = other DNA
gtgttgccctatcgtgattt

SEQ ID NO: 36660 - DNA, 20 bp, synthetic construct
  misc_feature 1..20: note = Description of Artificial Sequence: Synthetic oligonucleotide
  misc_feature 1..20: note = Target: FXN; (+) strand; PAM type: YTN; PAM sequence: TTG
  source 1..20: mol_type = other DNA
ccctatcgtgatttcagttg

SEQ ID NO: 36661 - DNA, 20 bp, synthetic construct
  misc_feature 1..20: note = Description of Artificial Sequence: Synthetic oligonucleotide
  misc_feature 1..20: note = Target: FXN; (+) strand; PAM type: YTN; PAM sequence: CTA
  source 1..20: mol_type = other DNA
tcgtgatttcagttgaattc

SEQ ID NO: 36662 - DNA, 20 bp, synthetic construct
  misc_feature 1..20: note = Description of Artificial Sequence: Synthetic oligonucleotide
  misc_feature 1..20: note = Target: FXN; (+) strand; PAM type: YTN; PAM sequence: TTT
  source 1..20: mol_type = other DNA
cagttgaattcatgtgaaaa

SEQ ID NO: 36663 - DNA, 20 bp, synthetic construct
  misc_feature 1..20: note = Description of Artificial Sequence: Synthetic oligonucleotide
  misc_feature 1..20: note = Target: FXN; (+) strand; PAM type: YTN; PAM sequence: TTC
  source 1..20: mol_type = other DNA
agttgaattcatgtgaaaat

SEQ ID NO: 36664 - DNA, 20 bp, synthetic construct
  misc_feature 1..20: note = Description of Artificial Sequence: Synthetic oligonucleotide
  misc_feature 1..20: note = Target: FXN; (+) strand; PAM type: YTN; PAM sequence: TTG
  source 1..20: mol_type = other DNA
aattcatgtgaaaataatag

SEQ ID NO: 36665 - DNA, 20 bp, synthetic construct
  misc_feature 1..20: note = Description of Artificial Sequence: Synthetic oligonucleotide
  misc_feature 1..20: note = Target: FXN; (+) strand; PAM type: YTN; PAM sequence: TTC
  source 1..20: mol_type = other DNA
atgtgaaaataatagccatc

SEQ ID NO: 36666 - DNA, 20 bp, synthetic construct
  misc_feature 1..20: note = Description of Artificial Sequence: Synthetic oligonucleotide
  misc_feature 1..20: note = Target: FXN; (+) strand; PAM type: YTN; PAM sequence: CTT
  source 1..20: mol_type = other DNA
ggcctggcgcggtggctcac

SEQ ID NO: 36667 - DNA, 20 bp, synthetic construct
  misc_feature 1..20: note = Description of Artificial Sequence: Synthetic oligonucleotide
  misc_feature 1..20: note = Target: FXN; (+) strand; PAM type: YTN; PAM sequence: TTG
  source 1..20: mol_type = other DNA
gcctggcgcggtggctcaca

SEQ ID NO: 36668 - DNA, 20 bp, synthetic construct
  misc_feature 1..20: note = Description of Artificial Sequence: Synthetic oligonucleotide
  misc_feature 1..20: note = Target: FXN; (+) strand; PAM type: YTN; PAM sequence: CTG
  source 1..20: mol_type = other DNA
gcgcggtggctcacacctgt

SEQ ID NO: 36669 - DNA, 20 bp, synthetic construct
  misc_feature 1..20: note = Description of Artificial Sequence: Synthetic oligonucleotide
  misc_feature 1..20: note = Target: FXN; (+) strand; PAM type: YTN; PAM sequence: CTC
  source 1..20: mol_type = other DNA
acacctgtaatcccagcact

SEQ ID NO: 36670 - DNA, 20 bp, synthetic construct
  misc_feature 1..20: note = Description of Artificial Sequence: Synthetic oligonucleotide
  misc_feature 1..20: note = Target: FXN; (+) strand; PAM type: YTN; PAM sequence: CTG
  source 1..20: mol_type = other DNA
taatcccagcacttttggag

SEQ ID NO: 36671 - DNA, 20 bp, synthetic construct
  misc_feature 1..20: note = Description of Artificial Sequence: Synthetic oligonucleotide
  misc_feature 1..20: note = Target: FXN; (+) strand; PAM type: YTN; PAM sequence: CTT
  source 1..20: mol_type = other DNA
ttggaggccaaggtgggtgg

SEQ ID NO: 36672 - DNA, 20 bp, synthetic construct
  misc_feature 1..20: note = Description of Artificial Sequence: Synthetic oligonucleotide
  misc_feature 1..20: note = Target: FXN; (+) strand; PAM type: YTN; PAM sequence: TTT
  source 1..20: mol_type = other DNA
tggaggccaaggtgggtgga

SEQ ID NO: 36673 - DNA, 20 bp, synthetic construct
  misc_feature 1..20: note = Description of Artificial Sequence: Synthetic oligonucleotide
  misc_feature 1..20: note = Target: FXN; (+) strand; PAM type: YTN; PAM sequence: TTT
  source 1..20: mol_type = other DNA
ggaggccaaggtgggtggat

SEQ ID NO: 36674 - DNA, 20 bp, synthetic construct
  misc_feature 1..20: note = Description of Artificial Sequence: Synthetic oligonucleotide
  misc_feature 1..20: note = Target: FXN; (+) strand; PAM type: YTN; PAM sequence: TTG
  source 1..20: mol_type = other DNA
gaggccaaggtgggtggatc

SEQ ID NO: 36675 - DNA, 20 bp, synthetic construct
  misc_feature 1..20: note = Description of Artificial Sequence: Synthetic oligonucleotide
  misc_feature 1..20: note = Target: FXN; (+) strand; PAM type: YTN; PAM sequence: CTG
  source 1..20: mol_type = other DNA
aggtcaggagttcaagacca

SEQ ID NO: 36676 - DNA, 20 bp, synthetic construct
  misc_feature 1..20: note = Description of Artificial Sequence: Synthetic oligonucleotide
  misc_feature 1..20: note = Target: FXN; (+) strand; PAM type: YTN; PAM sequence: TTC
  source 1..20: mol_type = other DNA
aagaccagcctggccaacat

SEQ ID NO: 36677 - DNA, 20 bp, synthetic construct
  misc_feature 1..20: note = Description of Artificial Sequence: Synthetic oligonucleotide
  misc_feature 1..20: note = Target: FXN; (+) strand; PAM type: YTN; PAM sequence: CTG
  source 1..20: mol_type = other DNA
gccaacatgatgaaaccccg

SEQ ID NO: 36678 - DNA, 20 bp, synthetic construct
  misc_feature 1..20: note = Description of Artificial Sequence: Synthetic oligonucleotide
  misc_feature 1..20: note = Target: FXN; (+) strand; PAM type: YTN; PAM sequence: CTC
  source 1..20: mol_type = other DNA
tactaaaaatacaaaaaatt

SEQ ID NO: 36679 - DNA, 20 bp, synthetic construct
  misc_feature 1..20: note = Description of Artificial Sequence: Synthetic oligonucleotide
  misc_feature 1..20: note = Target: FXN; (+) strand; PAM type: YTN; PAM sequence: CTA
  source 1..20: mol_type = other DNA
ctaaaaatacaaaaaattag

SEQ ID NO: 36680 - DNA, 20 bp, synthetic construct
  misc_feature 1..20: note = Description of Artificial Sequence: Synthetic oligonucleotide
  misc_feature 1..20: note = Target: FXN; (+) strand; PAM type: YTN; PAM sequence: CTA
  source 1..20: mol_type = other DNA
aaaatacaaaaaattagccg

SEQ ID NO: 36681 - DNA, 20 bp, synthetic construct
  misc_feature 1..20: note = Description of Artificial Sequence: Synthetic oligonucleotide
  misc_feature 1..20: note = Target: FXN; (+) strand; PAM type: YTN; PAM sequence: TTA
  source 1..20: mol_type = other DNA
gccgggcatgatggcaggtg

SEQ ID NO: 36682 - DNA, 20 bp, synthetic construct
  misc_feature 1..20: note = Description of Artificial Sequence: Synthetic oligonucleotide
  misc_feature 1..20: note = Target: FXN; (+) strand; PAM type: YTN; PAM sequence: CTG
  source 1..20: mol_type = other DNA
taatcccagctacttgggag

SEQ ID NO: 36683 - DNA, 20 bp, synthetic construct
  misc_feature 1..20: note = Description of Artificial Sequence: Synthetic oligonucleotide
  misc_feature 1..20: note = Target: FXN; (+) strand; PAM type: YTN; PAM sequence: CTA
  source 1..20: mol_type = other DNA
cttgggaggctgaagcggaa

SEQ ID NO: 36684 - DNA, 20 bp, synthetic construct
  misc_feature 1..20: note = Description of Artificial Sequence: Synthetic oligonucleotide
  misc_feature 1..20: note = Target: FXN; (+) strand; PAM type: YTN; PAM sequence: CTT
  source 1..20: mol_type = other DNA
gggaggctgaagcggaagaa

SEQ ID NO: 36685 - DNA, 20 bp, synthetic construct
  misc_feature 1..20: note = Description of Artificial Sequence: Synthetic oligonucleotide
  misc_feature 1..20: note = Target: FXN; (+) strand; PAM type: YTN; PAM sequence: TTG
  source 1..20: mol_type = other DNA
ggaggctgaagcggaagaat

SEQ ID NO: 36686 - DNA, 20 bp, synthetic construct
  misc_feature 1..20: note = Description of Artificial Sequence: Synthetic oligonucleotide
  misc_feature 1..20: note = Target: FXN; (+) strand; PAM type: YTN; PAM sequence: CTG
  source 1..20: mol_type = other DNA
aagcggaagaatcgcttgaa

SEQ ID NO: 36687 - DNA, 20 bp, synthetic construct
  misc_feature 1..20: note = Description of Artificial Sequence: Synthetic oligonucleotide
  misc_feature 1..20: note = Target: FXN; (+) strand; PAM type: YTN; PAM sequence: CTT
  source 1..20: mol_type = other DNA
gaacccagaggtggaggttg

SEQ ID NO: 36688 - DNA, 20 bp, synthetic construct
  misc_feature 1..20: note = Description of Artificial Sequence: Synthetic oligonucleotide
  misc_feature 1..20: note = Target: FXN; (+) strand; PAM type: YTN; PAM sequence: TTG
  source 1..20: mol_type = other DNA
aacccagaggtggaggttgc

SEQ ID NO: 36689 - DNA, 20 bp, synthetic construct
  misc_feature 1..20: note = Description of Artificial Sequence: Synthetic oligonucleotide
  misc_feature 1..20: note = Target: FXN; (+) strand; PAM type: YTN; PAM sequence: TTG
  source 1..20: mol_type = other DNA
cagtgagccgagatcgtgcc

SEQ ID NO: 36690 - DNA, 20 bp, synthetic construct
  misc_feature 1..20: note = Description of Artificial Sequence: Synthetic oligonucleotide
  misc_feature 1..20: note = Target: FXN; (+) strand; PAM type: YTN; PAM sequence: TTG
  source 1..20: mol_type = other DNA
cactgtaacctgggtgactg

SEQ ID NO: 36691 - DNA, 20 bp, synthetic construct
  misc_feature 1..20: note = Description of Artificial Sequence: Synthetic oligonucleotide
  misc_feature 1..20: note = Target: FXN; (+) strand; PAM type: YTN; PAM sequence: CTG
  source 1..20: mol_type = other DNA
taacctgggtgactgagcaa

SEQ ID NO: 36692 - DNA, 20 bp, synthetic construct
  misc_feature 1..20: note = Description of Artificial Sequence: Synthetic oligonucleotide
  misc_feature 1..20: note = Target: FXN; (+) strand; PAM type: YTN; PAM sequence: CTG
  source 1..20: mol_type = other DNA
ggtgactgagcaaaactctg

SEQ ID NO: 36693 - DNA, 20 bp, synthetic construct
  misc_feature 1..20: note = Description of Artificial Sequence: Synthetic oligonucleotide
  misc_feature 1..20: note = Target: FXN; (+) strand; PAM type: YTN; PAM sequence: CTG
  source 1..20: mol_type = other DNA
agcaaaactctgtctcaaaa

SEQ ID NO: 36694 - DNA, 20 bp, synthetic construct
  misc_feature 1..20: note = Description of Artificial Sequence: Synthetic oligonucleotide
  misc_feature 1..20: note = Target: FXN; (+) strand; PAM type: YTN; PAM sequence: CTC
  source 1..20: mol_type = other DNA
tgtctcaaaataataataac

SEQ ID NO: 36695 - DNA, 20 bp, synthetic construct
  misc_feature 1..20: note = Description of Artificial Sequence: Synthetic oligonucleotide
  misc_feature 1..20: note = Target: FXN; (+) strand; PAM type: YTN; PAM sequence: CTG
  source 1..20: mol_type = other DNA
tctcaaaataataataacaa

SEQ ID NO: 36696 - DNA, 20 bp, synthetic construct
  misc_feature 1..20: note = Description of Artificial Sequence: Synthetic oligonucleotide
  misc_feature 1..20: note = Target: FXN; (+) strand; PAM type: YTN; PAM sequence: CTC
  source 1..20: mol_type = other DNA
aaaataataataacaatata

SEQ ID NO: 36697 - DNA, 20 bp, synthetic construct
  misc_feature 1..20: note = Description of Artificial Sequence: Synthetic oligonucleotide
  misc_feature 1..20: note = Target: FXN; (+) strand; PAM type: YTN; PAM sequence: CTT
  source 1..20: mol_type = other DNA
tattgtacccttactgggtt

SEQ ID NO: 36698 - DNA, 20 bp, synthetic construct
  misc_feature 1..20: note = Description of Artificial Sequence: Synthetic oligonucleotide
  misc_feature 1..20: note = Target: FXN; (+) strand; PAM type: YTN; PAM sequence: TTT
  source 1..20: mol_type = other DNA
attgtacccttactgggtta

SEQ ID NO: 36699 - DNA, 20 bp, synthetic construct
  misc_feature 1..20: note = Description of Artificial Sequence: Synthetic oligonucleotide
  misc_feature 1..20: note = Target: FXN; (+) strand; PAM type: YTN; PAM sequence: TTA
  source 1..20: mol_type = other DNA
ttgtacccttactgggttaa

SEQ ID NO: 36700 - DNA, 20 bp, synthetic construct
  misc_feature 1..20: note = Description of Artificial Sequence: Synthetic oligonucleotide
  misc_feature 1..20: note = Target: FXN; (+) strand; PAM type: YTN; PAM sequence: TTG
  source 1..20: mol_type = other DNA
tacccttactgggttaatcg

SEQ ID NO: 36701 - DNA, 20 bp, synthetic construct
  misc_feature 1..20: note = Description of Artificial Sequence: Synthetic oligonucleotide
  misc_feature 1..20: note = Target: FXN; (+) strand; PAM type: YTN; PAM sequence: CTT
  source 1..20: mol_type = other DNA
actgggttaatcgtattata

SEQ ID NO: 36702 - DNA, 20 bp, synthetic construct
  misc_feature 1..20: note = Description of Artificial Sequence: Synthetic oligonucleotide
  misc_feature 1..20: note = Target: FXN; (+) strand; PAM type: YTN; PAM sequence: TTA
  source 1..20: mol_type = other DNA
ctgggttaatcgtattatac

SEQ ID NO: 36703 - DNA, 20 bp, synthetic construct
  misc_feature 1..20: note = Description of Artificial Sequence: Synthetic oligonucleotide
  misc_feature 1..20: note = Target: FXN; (+) strand; PAM type: YTN; PAM sequence: CTG
  source 1..20: mol_type = other DNA
ggttaatcgtattataccac

SEQ ID NO: 36704 - DNA, 20 bp, synthetic construct
  misc_feature 1..20: note = Description of Artificial Sequence: Synthetic oligonucleotide
  misc_feature 1..20: note = Target: FXN; (+) strand; PAM type: YTN; PAM sequence: TTA
  source 1..20: mol_type = other DNA
atcgtattataccacattac

SEQ ID NO: 36705 - DNA, 20 bp, synthetic construct
  misc_feature 1..20: note = Description of Artificial Sequence: Synthetic oligonucleotide
  misc_feature 1..20: note = Target: FXN; (+) strand; PAM type: YTN; PAM sequence: TTA
  source 1..20: mol_type = other DNA
taccacattacctcatttta

SEQ ID NO: 36706 - DNA, 20 bp, synthetic construct
  misc_feature 1..20: note = Description of Artificial Sequence: Synthetic oligonucleotide
  misc_feature 1..20: note = Target: FXN; (+) strand; PAM type: YTN; PAM sequence: TTA
  source 1..20: mol_type = other DNA
cctcattttaatttttactg

SEQ ID NO: 36707 - DNA, 20 bp, synthetic construct
  misc_feature 1..20: note = Description of Artificial Sequence: Synthetic oligonucleotide
  misc_feature 1..20: note = Target: FXN; (+) strand; PAM type: YTN; PAM sequence: CTC
  source 1..20: mol_type = other DNA
attttaatttttactgacct

SEQ ID NO: 36708 - DNA, 20 bp, synthetic construct
  misc_feature 1..20: note = Description of Artificial Sequence: Synthetic oligonucleotide
  misc_feature 1..20: note = Target: FXN; (+) strand; PAM type: YTN; PAM sequence: TTT
  source 1..20: mol_type = other DNA
taatttttactgacctgcac

SEQ ID NO: 36709 - DNA, 20 bp, synthetic construct
  misc_feature 1..20: note = Description of Artificial Sequence: Synthetic oligonucleotide
  misc_feature 1..20: note = Target: FXN; (+) strand; PAM type: YTN; PAM sequence: TTT
  source 1..20: mol_type = other DNA
aatttttactgacctgcact

SEQ ID NO: 36710 - DNA, 20 bp, synthetic construct
  misc_feature 1..20: note = Description of Artificial Sequence: Synthetic oligonucleotide
  misc_feature 1..20: note = Target: FXN; (+) strand; PAM type: YTN; PAM sequence: TTA
  source 1..20: mol_type = other DNA
atttttactgacctgcactt

SEQ ID NO: 36711 - DNA, 20 bp, synthetic construct
  misc_feature 1..20: note = Description of Artificial Sequence: Synthetic oligonucleotide
  misc_feature 1..20: note = Target: FXN; (+) strand; PAM type: YTN; PAM sequence: TTT
  source 1..20: mol_type = other DNA
ttactgacctgcactttata

SEQ ID NO: 36712 - DNA, 20 bp, synthetic construct
  misc_feature 1..20: note = Description of Artificial Sequence: Synthetic oligonucleotide
  misc_feature 1..20: note = Target: FXN; (+) strand; PAM type: YTN; PAM sequence: TTT
  source 1..20: mol_type = other DNA
tactgacctgcactttatac

SEQ ID NO: 36713 - DNA, 20 bp, synthetic construct
  misc_feature 1..20: note = Description of Artificial Sequence: Synthetic oligonucleotide
  misc_feature 1..20: note = Target: FXN; (+) strand; PAM type: YTN; PAM sequence: TTT
  source 1..20: mol_type = other DNA
actgacctgcactttataca

SEQ ID NO: 36714 - DNA, 20 bp, synthetic construct
  misc_feature 1..20: note = Description of Artificial Sequence: Synthetic oligonucleotide
  misc_feature 1..20: note = Target: FXN; (+) strand; PAM type: YTN; PAM sequence: TTA
  source 1..20: mol_type = other DNA
ctgacctgcactttatacaa

SEQ ID NO: 36715 - DNA, 20 bp, synthetic construct
  misc_feature 1..20: note = Description of Artificial Sequence: Synthetic oligonucleotide
  misc_feature 1..20: note = Target: FXN; (+) strand; PAM type: YTN; PAM sequence: CTG
  source 1..20: mol_type = other DNA
acctgcactttatacaaagc

SEQ ID NO: 36716 - DNA, 20 bp, synthetic construct
  misc_feature 1..20: note = Description of Artificial Sequence: Synthetic oligonucleotide
  misc_feature 1..20: note = Target: FXN; (+) strand; PAM type: YTN; PAM sequence: CTG
  source 1..20: mol_type = other DNA
cactttatacaaagcaacaa

SEQ ID NO: 36717 - DNA, 20 bp, synthetic construct
  misc_feature 1..20: note = Description of Artificial Sequence: Synthetic oligonucleotide
  misc_feature 1..20: note = Target: FXN; (+) strand; PAM type: YTN; PAM sequence: CTT
  source 1..20: mol_type = other DNA
tatacaaagcaacaagcctc

SEQ ID NO: 36718 - DNA, 20 bp, synthetic construct
  misc_feature 1..20: note = Description of Artificial Sequence: Synthetic oligonucleotide
  misc_feature 1..20: note = Target: FXN; (+) strand; PAM type: YTN; PAM sequence: TTT
  source 1..20: mol_type = other DNA
atacaaagcaacaagcctcc

SEQ ID NO: 36719 - DNA, 20 bp, synthetic construct
  misc_feature 1..20: note = Description of Artificial Sequence: Synthetic oligonucleotide
  misc_feature 1..20: note = Target: FXN; (+) strand; PAM type: YTN; PAM sequence: TTA
  source 1..20: mol_type = other DNA
tacaaagcaacaagcctcca

SEQ ID NO: 36720 - DNA, 20 bp, synthetic construct
  misc_feature 1..20: note = Description of Artificial Sequence: Synthetic oligonucleotide
  misc_feature 1..20: note = Target: FXN; (+) strand; PAM type: YTN; PAM sequence: CTC
  source 1..20: mol_type = other DNA
caggacattaaaattcatgc

SEQ ID NO: 36721 - DNA, 20 bp, synthetic construct
  misc_feature 1..20: note = Description of Artificial Sequence: Synthetic oligonucleotide
  misc_feature 1..20: note = Target: FXN; (+) strand; PAM type: YTN; PAM sequence: TTA
  source 1..20: mol_type = other DNA
aaattcatgcaaagttatgc

SEQ ID NO: 36722 - DNA, 20 bp, synthetic construct
  misc_feature 1..20: note = Description of Artificial Sequence: Synthetic oligonucleotide
  misc_feature 1..20: note = Target: FXN; (+) strand; PAM type: YTN; PAM sequence: TTC
  source 1..20: mol_type = other DNA
atgcaaagttatgctcatgt

SEQ ID NO: 36723 - DNA, 20 bp, synthetic construct
  misc_feature 1..20: note = Description of Artificial Sequence: Synthetic oligonucleotide
  misc_feature 1..20: note = Target: FXN; (+) strand; PAM type: YTN; PAM sequence: TTA
  source 1..20: mol_type = other DNA
tgctcatgttatattatttt

SEQ ID NO: 36724 - DNA, 20 bp, synthetic construct
  misc_feature 1..20: note = Description of Artificial Sequence: Synthetic oligonucleotide
  misc_feature 1..20: note = Target: FXN; (+) strand; PAM type: YTN; PAM sequence: CTC
  source 1..20: mol_type = other DNA
atgttatattattttcttac

SEQ ID NO: 36725 - DNA, 20 bp, synthetic construct
  misc_feature 1..20: note = Description of Artificial Sequence: Synthetic oligonucleotide
  misc_feature 1..20: note = Target: FXN; (+) strand; PAM type: YTN; PAM sequence: TTA
  source 1..20: mol_type = other DNA
tattattttcttacttaaag

SEQ ID NO: 36726 - DNA, 20 bp, synthetic construct
  misc_feature 1..20: note = Description of Artificial Sequence: Synthetic oligonucleotide
  misc_feature 1..20: note = Target: FXN; (+) strand; PAM type: YTN; PAM sequence: TTA
  source 1..20: mol_type = other DNA
ttttcttacttaaagaagga

SEQ ID NO: 36727 - DNA, 20 bp, synthetic construct
  misc_feature 1..20: note = Description of Artificial Sequence: Synthetic oligonucleotide
  misc_feature 1..20: note = Target: FXN; (+) strand; PAM type: YTN; PAM sequence: TTT
  source 1..20: mol_type = other DNA
tcttacttaaagaaggattt

SEQ ID NO: 36728 - DNA, 20 bp, synthetic construct
  misc_feature 1..20: note = Description of Artificial Sequence: Synthetic oligonucleotide
  misc_feature 1..20: note = Target: FXN; (+) strand; PAM type: YTN; PAM sequence: TTT
  source 1..20: mol_type = other DNA
cttacttaaagaaggattta

SEQ ID NO: 36729 - DNA, 20 bp, synthetic construct
  misc_feature 1..20: note = Description of Artificial Sequence: Synthetic oligonucleotide
  misc_feature 1..20: note = Target: FXN; (+) strand; PAM type: YTN; PAM sequence: TTC
  source 1..20: mol_type = other DNA
ttacttaaagaaggatttat

SEQ ID NO: 36730 - DNA, 20 bp, synthetic construct
  misc_feature 1..20: note = Description of Artificial Sequence: Synthetic oligonucleotide
  misc_feature 1..20: note = Target: FXN; (+) strand; PAM type: YTN; PAM sequence: CTT
  source 1..20: mol_type = other DNA
acttaaagaaggatttatta

SEQ ID NO: 36731 - DNA, 20 bp, synthetic construct
  misc_feature 1..20: note = Description of Artificial Sequence: Synthetic oligonucleotide
  misc_feature 1..20: note = Target: FXN; (+) strand; PAM type: YTN; PAM sequence: TTA
  source 1..20: mol_type = other DNA
cttaaagaaggatttattag

SEQ ID NO: 36732 - DNA, 20 bp, synthetic construct
  misc_feature 1..20: note = Description of Artificial Sequence: Synthetic oligonucleotide
  misc_feature 1..20: note = Target: FXN; (+) strand; PAM type: YTN; PAM sequence: CTT
  source 1..20: mol_type = other DNA
aaagaaggatttattagtgg

SEQ ID NO: 36733 - DNA, 20 bp, synthetic construct
  misc_feature 1..20: note = Description of Artificial Sequence: Synthetic oligonucleotide
  misc_feature 1..20: note = Target: FXN; (+) strand; PAM type: YTN; PAM sequence: TTA
  source 1..20: mol_type = other DNA
aagaaggatttattagtggc

SEQ ID NO: 36734 - DNA, 20 bp, synthetic construct
  misc_feature 1..20: note = Description of Artificial Sequence: Synthetic oligonucleotide
  misc_feature 1..20: note = Target: FXN; (+) strand; PAM type: YTN; PAM sequence: TTT
  source 1..20: mol_type = other DNA
attagtggctgggcatggtg

SEQ ID NO: 36735 - DNA, 20 bp, synthetic construct
  misc_feature 1..20: note = Description of Artificial Sequence: Synthetic oligonucleotide
  misc_feature 1..20: note = Target: FXN; (+) strand; PAM type: YTN; PAM sequence: TTA
  source 1..20: mol_type = other DNA
ttagtggctgggcatggtgg

SEQ ID NO: 36736 - DNA, 20 bp, synthetic construct
  misc_feature 1..20: note = Description of Artificial Sequence: Synthetic oligonucleotide
  misc_feature 1..20: note = Target: FXN; (+) strand; PAM type: YTN; PAM sequence: TTA
  source 1..20: mol_type = other DNA
gtggctgggcatggtggcgt

SEQ ID NO: 36737 - DNA, 20 bp, synthetic construct
  misc_feature 1..20: note = Description of Artificial Sequence: Synthetic oligonucleotide
  misc_feature 1..20: note = Target: FXN; (+) strand; PAM type: YTN; PAM sequence: CTG
  source 1..20: mol_type = other DNA
ggcatggtggcgtgcacctg

SEQ ID NO: 36738 - DNA, 20 bp, synthetic construct
  misc_feature 1..20: note = Description of Artificial Sequence: Synthetic oligonucleotide
  misc_feature 1..20: note = Target: FXN; (+) strand; PAM type: YTN; PAM sequence: CTG
  source 1..20: mol_type = other DNA
taatcccaggtactcaggag

SEQ ID NO: 36739 - DNA, 20 bp, synthetic construct
  misc_feature 1..20: note = Description of Artificial Sequence: Synthetic oligonucleotide
  misc_feature 1..20: note = Target: FXN; (+) strand; PAM type: YTN; PAM sequence: CTC
  source 1..20: mol_type = other DNA
aggaggctgagacgggagaa

SEQ ID NO: 36740 - DNA, 20 bp, synthetic construct
  misc_feature 1..20: note = Description of Artificial Sequence: Synthetic oligonucleotide
  misc_feature 1..20: note = Target: FXN; (+) strand; PAM type: YTN; PAM sequence: CTG
  source 1..20: mol_type = other DNA
agacgggagaattgcttgac

SEQ ID NO: 36741 - DNA, 20 bp, synthetic construct
  misc_feature 1..20: note = Description of Artificial Sequence: Synthetic oligonucleotide
  misc_feature 1..20: note = Target: FXN; (+) strand; PAM type: YTN; PAM sequence: TTG
  source 1..20: mol_type = other DNA
cttgaccccaggcggaggag

SEQ ID NO: 36742 - DNA, 20 bp, synthetic construct
  misc_feature 1..20: note = Description of Artificial Sequence: Synthetic oligonucleotide
  misc_feature 1..20: note = Target: FXN; (+) strand; PAM type: YTN; PAM sequence: CTT
  source 1..20: mol_type = other DNA
gaccccaggcggaggaggtt

SEQ ID NO: 36743 - DNA, 20 bp, synthetic construct
  misc_feature 1..20: note = Description of Artificial Sequence: Synthetic oligonucleotide
  misc_feature 1..20: note = Target: FXN; (+) strand; PAM type: YTN; PAM sequence: TTG
  source 1..20: mol_type = other DNA
accccaggcggaggaggtta

SEQ ID NO: 36744 - DNA, 20 bp, synthetic construct
  misc_feature 1..20: note = Description of Artificial Sequence: Synthetic oligonucleotide
  misc_feature 1..20: note = Target: FXN; (+) strand; PAM type: YTN; PAM sequence: TTA
  source 1..20: mol_type = other DNA
cagtgagtcgagatcgtacc

SEQ ID NO: 36745 - DNA, 20 bp, synthetic construct
  misc_feature 1..20: note = Description of Artificial Sequence: Synthetic oligonucleotide
  misc_feature 1..20: note = Target: FXN; (+) strand; PAM type: YTN; PAM sequence: CTG
  source 1..20: mol_type = other DNA
agcgacagagcgagactccg

SEQ ID NO: 36746 - DNA, 20 bp, synthetic construct
  misc_feature 1..20: note = Description of Artificial Sequence: Synthetic oligonucleotide
  misc_feature 1..20: note = Target: FXN; (+) strand; PAM type: YTN; PAM sequence: CTC
  source 1..20: mol_type = other DNA
cgtctcaaaaaaaaaaaaaa

SEQ ID NO: 36747 - DNA, 20 bp, synthetic construct
  misc_feature 1..20: note = Description of Artificial Sequence: Synthetic oligonucleotide
  misc_feature 1..20: note = Target: FXN; (+) strand; PAM type: YTN; PAM sequence: CTC
  source 1..20: mol_type = other DNA
aaaaaaaaaaaaaaggaggg

SEQ ID NO: 36748 - DNA, 20 bp, synthetic construct
  misc_feature 1..20: note = Description of Artificial Sequence: Synthetic oligonucleotide
  misc_feature 1..20: note = Target: FXN; (+) strand; PAM type: YTN; PAM sequence: TTT
  source 1..20: mol_type = other DNA
attaatgagaagtttgtatt

SEQ ID NO: 36749 - DNA, 20 bp, synthetic construct
  misc_feature 1..20: note = Description of Artificial Sequence: Synthetic oligonucleotide
  misc_feature 1..20: note = Target: FXN; (+) strand; PAM type: YTN; PAM sequence: TTA
  source 1..20: mol_type = other DNA
ttaatgagaagtttgtatta

SEQ ID NO: 36750 - DNA, 20 bp, synthetic construct
  misc_feature 1..20: note = Description of Artificial Sequence: Synthetic oligonucleotide
  misc_feature 1..20: note = Target: FXN; (+) strand; PAM type: YTN; PAM sequence: TTA
  source 1..20: mol_type = other DNA
atgagaagtttgtattaata

SEQ ID NO: 36751 - DNA, 20 bp, synthetic construct
  misc_feature 1..20: note = Description of Artificial Sequence: Synthetic oligonucleotide
  misc_feature 1..20: note = Target: FXN; (+) strand; PAM type: YTN; PAM sequence: TTT
  source 1..20: mol_type = other DNA
gtattaatatgtagcaaagg

SEQ ID NO: 36752 - DNA, 20 bp, synthetic construct
  misc_feature 1..20: note = Description of Artificial Sequence: Synthetic oligonucleotide
  misc_feature 1..20: note = Target: FXN; (+) strand; PAM type: YTN; PAM sequence: TTG
  source 1..20: mol_type = other DNA
tattaatatgtagcaaaggc

SEQ ID NO: 36753 - DNA, 20 bp, synthetic construct
  misc_feature 1..20: note = Description of Artificial Sequence: Synthetic oligonucleotide
  misc_feature 1..20: note = Target: FXN; (+) strand; PAM type: YTN; PAM sequence: TTA
  source 1..20: mol_type = other DNA
atatgtagcaaaggcttttc

SEQ ID NO: 36754 - DNA, 20 bp, synthetic construct
  misc_feature 1..20: note = Description of Artificial Sequence: Synthetic oligonucleotide
  misc_feature 1..20: note = Target: FXN; (+) strand; PAM type: YTN; PAM sequence: CTT
  source 1..20: mol_type = other DNA
ttccaatgggtgaataaaaa

SEQ ID NO: 36755 - DNA, 20 bp, synthetic construct
  misc_feature 1..20: note = Description of Artificial Sequence: Synthetic oligonucleotide
  misc_feature 1..20: note = Target: FXN; (+) strand; PAM type: YTN; PAM sequence: TTT
  source 1..20: mol_type = other DNA
tccaatgggtgaataaaaac

SEQ ID NO: 36756 - DNA, 20 bp, synthetic construct
  misc_feature 1..20: note = Description of Artificial Sequence: Synthetic oligonucleotide
  misc_feature 1..20: note = Target: FXN; (+) strand; PAM type: YTN; PAM sequence: TTT
  source 1..20: mol_type = other DNA
ccaatgggtgaataaaaaca

SEQ ID NO: 36757 - DNA, 20 bp, synthetic construct
  misc_feature 1..20: note = Description of Artificial Sequence: Synthetic oligonucleotide
  misc_feature 1..20: note = Target: FXN; (+) strand; PAM type: YTN; PAM sequence: TTC
  source 1..20: mol_type = other DNA
caatgggtgaataaaaacac

SEQ ID NO: 36758 - DNA, 20 bp, synthetic construct
  misc_feature 1..20: note = Description of Artificial Sequence: Synthetic oligonucleotide
  misc_feature 1..20: note = Target: FXN; (+) strand; PAM type: YTN; PAM sequence: TTC
  source 1..20: mol_type = other DNA
cattaagtcaagctgggagc

SEQ ID NO: 36759 - DNA, 20 bp, synthetic construct
  misc_feature 1..20: note = Description of Artificial Sequence: Synthetic oligonucleotide
  misc_feature 1..20: note = Target: FXN; (+) strand; PAM type: YTN; PAM sequence: TTA
  source 1..20: mol_type = other DNA
agtcaagctgggagcagtgg

SEQ ID NO: 36760 - DNA, 20 bp, synthetic construct
  misc_feature 1..20: note = Description of Artificial Sequence: Synthetic oligonucleotide
  misc_feature 1..20: note = Target: FXN; (+) strand; PAM type: YTN; PAM sequence: CTG
  source 1..20: mol_type = other DNA
ggagcagtggcatataccta

SEQ ID NO: 36761 - DNA, 20 bp, synthetic construct
  misc_feature 1..20: note = Description of Artificial Sequence: Synthetic oligonucleotide
  misc_feature 1..20: note = Target: FXN; (+) strand; PAM type: YTN; PAM sequence: CTA
  source 1..20: mol_type = other DNA
tagtcccagctgcacaggag

SEQ ID NO: 36762 - DNA, 20 bp, synthetic construct
  misc_feature 1..20: note = Description of Artificial Sequence: Synthetic oligonucleotide
  misc_feature 1..20: note = Target: FXN; (+) strand; PAM type: YTN; PAM sequence: CTG
  source 1..20: mol_type = other DNA
cacaggaggctgagacagga

SEQ ID NO: 36763 - DNA, 20 bp, synthetic construct
  misc_feature 1..20: note = Description of Artificial Sequence: Synthetic oligonucleotide
  misc_feature 1..20: note = Target: FXN; (+) strand; PAM type: YTN; PAM sequence: CTG
  source 1..20: mol_type = other DNA
agacaggaggattgcttgaa

SEQ ID NO: 36764 - DNA, 20 bp, synthetic construct
  misc_feature 1..20: note = Description of Artificial Sequence: Synthetic oligonucleotide
  misc_feature 1..20: note = Target: FXN; (+) strand; PAM type: YTN; PAM sequence: TTG
  source 1..20: mol_type = other DNA
cttgaagccaggaattggag

SEQ ID NO: 36765 - DNA, 20 bp, synthetic construct
  misc_feature 1..20: note = Description of Artificial Sequence: Synthetic oligonucleotide
  misc_feature 1..20: note = Target: FXN; (+) strand; PAM type: YTN; PAM sequence: CTT
  source 1..20: mol_type = other DNA
gaagccaggaattggagatc

SEQ ID NO: 36766 - DNA, 20 bp, synthetic construct
  misc_feature 1..20: note = Description of Artificial Sequence: Synthetic oligonucleotide
  misc_feature 1..20: note = Target: FXN; (+) strand; PAM type: YTN; PAM sequence: TTG
  source 1..20: mol_type = other DNA
aagccaggaattggagatca

SEQ ID NO: 36767 - DNA, 20 bp, synthetic construct
  misc_feature 1..20: note = Description of Artificial Sequence: Synthetic oligonucleotide
  misc_feature 1..20: note = Target: FXN; (+) strand; PAM type: YTN; PAM sequence: TTG
  source 1..20: mol_type = other DNA
gagatcagcctgggcaacac

SEQ ID NO: 36768 - DNA, 20 bp, synthetic construct
  misc_feature 1..20: note = Description of Artificial Sequence: Synthetic oligonucleotide
  misc_feature 1..20: note = Target: FXN; (+) strand; PAM type: YTN; PAM sequence: CTG
  source 1..20: mol_type = other DNA
ggcaacacagcaagatccta

SEQ ID NO: 36769 - DNA, 20 bp, synthetic construct
  misc_feature 1..20: note = Description of Artificial Sequence: Synthetic oligonucleotide
  misc_feature 1..20: note = Target: FXN; (+) strand; PAM type: YTN; PAM sequence: CTA
  source 1..20: mol_type = other DNA
tctcttaaaaaaagaaaaaa

SEQ ID NO: 36770 - DNA, 20 bp, synthetic construct
  misc_feature 1..20: note = Description of Artificial Sequence: Synthetic oligonucleotide
  misc_feature 1..20: note = Target: FXN; (+) strand; PAM type: YTN; PAM sequence: CTC
  source 1..20: mol_type = other DNA
ttaaaaaaagaaaaaaaaac

SEQ ID NO: 36771 - DNA, 20 bp, synthetic construct
  misc_feature 1..20: note = Description of Artificial Sequence: Synthetic oligonucleotide
  misc_feature 1..20: note = Target: FXN; (+) strand; PAM type: YTN; PAM sequence: CTT
  source 1..20: mol_type = other DNA
aaaaaaagaaaaaaaaacct

SEQ ID NO: 36772 - DNA, 20 bp, synthetic construct
  misc_feature 1..20: note = Description of Artificial Sequence: Synthetic oligonucleotide
  misc_feature 1..20: note = Target: FXN; (+) strand; PAM type: YTN; PAM sequence: TTA
  source 1..20: mol_type = other DNA
aaaaaagaaaaaaaaaccta

SEQ ID NO: 36773 - DNA, 20 bp, synthetic construct
  misc_feature 1..20: note = Description of Artificial Sequence: Synthetic oligonucleotide
  misc_feature 1..20: note = Target: FXN; (+) strand; PAM type: YTN; PAM sequence: CTA
  source 1..20: mol_type = other DNA
ttaataataaaacagtataa

SEQ ID NO: 36774 - DNA, 20 bp, synthetic construct
  misc_feature 1..20: note = Description of Artificial Sequence: Synthetic oligonucleotide
  misc_feature 1..20: note = Target: FXN; (+) strand; PAM type: YTN; PAM sequence: TTA
  source 1..20: mol_type = other DNA
ataataaaacagtataaaca

SEQ ID NO: 36775 - DNA, 20 bp, synthetic construct
  misc_feature 1..20: note = Description of Artificial Sequence: Synthetic oligonucleotide
  misc_feature 1..20: note = Target: FXN; (+) strand; PAM type: YTN; PAM sequence: CTA
  source 1..20: mol_type = other DNA
aataggtaaaatattttttc

SEQ ID NO: 36776 - DNA, 20 bp, synthetic construct
  misc_feature 1..20: note = Description of Artificial Sequence: Synthetic oligonucleotide
  misc_feature 1..20: note = Target: FXN; (+) strand; PAM type: YTN; PAM sequence: TTT
  source 1..20: mol_type = other DNA
tttctgaaataaaattattt

SEQ ID NO: 36777 - DNA, 20 bp, synthetic construct
  misc_feature 1..20: note = Description of Artificial Sequence: Synthetic oligonucleotide
  misc_feature 1..20: note = Target: FXN; (+) strand; PAM type: YTN; PAM sequence: TTT
  source 1..20: mol_type = other DNA
ttctgaaataaaattatttt

SEQ ID NO: 36778 - DNA, 20 bp, synthetic construct
  misc_feature 1..20: note = Description of Artificial Sequence: Synthetic oligonucleotide
  misc_feature 1..20: note = Target: FXN; (+) strand; PAM type: YTN; PAM sequence: TTT
  source 1..20: mol_type = other DNA
tctgaaataaaattattttt

SEQ ID NO: 36779 - DNA, 20 bp, synthetic construct
  misc_feature 1..20: note = Description of Artificial Sequence: Synthetic oligonucleotide
  misc_feature 1..20: note = Target: FXN; (+) strand; PAM type: YTN; PAM sequence: TTT
  source 1..20: mol_type = other DNA
ctgaaataaaattatttttt

SEQ ID NO: 36780 - DNA, 20 bp, synthetic construct
  misc_feature 1..20: note = Description of Artificial Sequence: Synthetic oligonucleotide
  misc_feature 1..20: note = Target: FXN; (+) strand; PAM type: YTN; PAM sequence: TTC
  source 1..20: mol_type = other DNA
tgaaataaaattattttttg

SEQ ID NO: 36781 - DNA, 20 bp, synthetic construct
  misc_feature 1..20: note = Description of Artificial Sequence: Synthetic oligonucleotide
  misc_feature 1..20: note = Target: FXN; (+) strand; PAM type: YTN; PAM sequence: CTG
  source 1..20: mol_type = other DNA
aaataaaattattttttgag

SEQ ID NO: 36782 - DNA, 20 bp, synthetic construct
  misc_feature 1..20: note = Description of Artificial Sequence: Synthetic oligonucleotide
  misc_feature 1..20: note = Target: FXN; (+) strand; PAM type: YTN; PAM sequence: TTA
  source 1..20: mol_type = other DNA
ttttttgagtctgatggaaa

SEQ ID NO: 36783 - DNA, 20 bp, synthetic construct
  misc_feature 1..20: note = Description of Artificial Sequence: Synthetic oligonucleotide
  misc_feature 1..20: note = Target: FXN; (+) strand; PAM type: YTN; PAM sequence: TTT
  source 1..20: mol_type = other DNA
tttgagtctgatggaaatgt

SEQ ID NO: 36784 - DNA, 20 bp, synthetic construct
  misc_feature 1..20: note = Description of Artificial Sequence: Synthetic oligonucleotide
  misc_feature 1..20: note = Target: FXN; (+) strand; PAM type: YTN; PAM sequence: TTT
  source 1..20: mol_type = other DNA
ttgagtctgatggaaatgtt

SEQ ID NO: 36785 - DNA, 20 bp, synthetic construct
  misc_feature 1..20: note = Description of Artificial Sequence: Synthetic oligonucleotide
  misc_feature 1..20: note = Target: FXN; (+) strand; PAM type: YTN; PAM sequence: TTT
  source 1..20: mol_type = other DNA
tgagtctgatggaaatgttt

SEQ ID NO: 36786 - DNA, 20 bp, synthetic construct
  misc_feature 1..20: note = Description of Artificial Sequence: Synthetic oligonucleotide
  misc_feature 1..20: note = Target: FXN; (+) strand; PAM type: YTN; PAM sequence: TTT
  source 1..20: mol_type = other DNA
gagtctgatggaaatgttta

SEQ ID NO: 36787 - DNA, 20 bp, synthetic construct
  misc_feature 1..20: note = Description of Artificial Sequence: Synthetic oligonucleotide
  misc_feature 1..20: note = Target: FXN; (+) strand; PAM type: YTN; PAM sequence: TTG
  source 1..20: mol_type = other DNA
agtctgatggaaatgtttaa

SEQ ID NO: 36788 - DNA, 20 bp, synthetic construct
  misc_feature 1..20: note = Description of Artificial Sequence: Synthetic oligonucleotide
  misc_feature 1..20: note = Target: FXN; (+) strand; PAM type: YTN; PAM sequence: CTG
  source 1..20: mol_type = other DNA
atggaaatgtttaagtgcag

SEQ ID NO: 36789 - DNA, 20 bp, synthetic construct
  misc_feature 1..20: note = Description of Artificial Sequence: Synthetic oligonucleotide
  misc_feature 1..20: note = Target: FXN; (+) strand; PAM type: YTN; PAM sequence: TTT
  source 1..20: mol_type = other DNA
aagtgcagtaggccagtgcc

SEQ ID NO: 36790 - DNA, 20 bp, synthetic construct
  misc_feature 1..20: note = Description of Artificial Sequence: Synthetic oligonucleotide
  misc_feature 1..20: note = Target: FXN; (+) strand; PAM type: YTN; PAM sequence: TTA
  source 1..20: mol_type = other DNA
agtgcagtaggccagtgcca

SEQ ID NO: 36791 - DNA, 20 bp, synthetic construct
  misc_feature 1..20: note = Description of Artificial Sequence: Synthetic oligonucleotide
  misc_feature 1..20: note = Target: FXN; (+) strand; PAM type: YTN; PAM sequence: TTT
  source 1..20: mol_type = other DNA
gtatgtgtttgcatcttgct

SEQ ID NO: 36792 - DNA, 20 bp, synthetic construct
  misc_feature 1..20: note = Description of Artificial Sequence: Synthetic oligonucleotide
  misc_feature 1..20: note = Target: FXN; (+) strand; PAM type: YTN; PAM sequence: TTG
  source 1..20: mol_type = other DNA
tatgtgtttgcatcttgctt

SEQ ID NO: 36793 - DNA, 20 bp, synthetic construct
  misc_feature 1..20: note = Description of Artificial Sequence: Synthetic oligonucleotide
  misc_feature 1..20: note = Target: FXN; (+) strand; PAM type: YTN; PAM sequence: TTT
  source 1..20: mol_type = other DNA
gcatcttgcttctactgaaa

SEQ ID NO: 36794 - DNA, 20 bp, synthetic construct
  misc_feature 1..20: note = Description of Artificial Sequence: Synthetic oligonucleotide
  misc_feature 1..20: note = Target: FXN; (+) strand; PAM type: YTN; PAM sequence: TTG
  source 1..20: mol_type = other DNA
catcttgcttctactgaaag

SEQ ID NO: 36795 - DNA, 20 bp, synthetic construct
  misc_feature 1..20: note = Description of Artificial Sequence: Synthetic oligonucleotide
  misc_feature 1..20: note = Target: FXN; (+) strand; PAM type: YTN; PAM sequence: CTT
  source 1..20: mol_type = other DNA
gcttctactgaaagtttcag

SEQ ID NO: 36796 - DNA, 20 bp, synthetic construct
  misc_feature 1..20: note = Description of Artificial Sequence: Synthetic oligonucleotide
  misc_feature 1..20: note = Target: FXN; (+) strand; PAM type: YTN; PAM sequence: TTG
  source 1..20: mol_type = other DNA
cttctactgaaagtttcagt

SEQ ID NO: 36797 - DNA, 20 bp, synthetic construct
  misc_feature 1..20: note = Description of Artificial Sequence: Synthetic oligonucleotide
  misc_feature 1..20: note = Target: FXN; (+) strand; PAM type: YTN; PAM sequence: CTT
  source 1..20: mol_type = other DNA
ctactgaaagtttcagtgca

SEQ ID NO: 36798 - DNA, 20 bp, synthetic construct
  misc_feature 1..20: note = Description of Artificial Sequence: Synthetic oligonucleotide
  misc_feature 1..20: note = Target: FXN; (+) strand; PAM type: YTN; PAM sequence: TTC
  source 1..20: mol_type = other DNA
tactgaaagtttcagtgcac

SEQ ID NO: 36799 - DNA, 20 bp, synthetic construct
  misc_feature 1..20: note = Description of Artificial Sequence: Synthetic oligonucleotide
  misc_feature 1..20: note = Target: FXN; (+) strand; PAM type: YTN; PAM sequence: CTA
  source 1..20: mol_type = other DNA
ctgaaagtttcagtgcaccc

SEQ ID NO: 36800 - DNA, 20 bp, synthetic construct
  misc_feature 1..20: note = Description of Artificial Sequence: Synthetic oligonucleotide
  misc_feature 1..20: note = Target: FXN; (+) strand; PAM type: YTN; PAM sequence: CTG
  source 1..20: mol_type = other DNA
aaagtttcagtgcaccccac

SEQ ID NO: 36801 - DNA, 20 bp, synthetic construct
  misc_feature 1..20: note = Description of Artificial Sequence: Synthetic oligonucleotide
  misc_feature 1..20: note = Target: FXN; (+) strand; PAM type: YTN; PAM sequence: TTT
  source 1..20: mol_type = other DNA
cagtgcaccccacttactta

SEQ ID NO: 36802 - DNA, 20 bp, synthetic construct
  misc_feature 1..20: note = Description of Artificial Sequence: Synthetic oligonucleotide
  misc_feature 1..20: note = Target: FXN; (+) strand; PAM type: YTN; PAM sequence: TTC
  source 1..20: mol_type = other DNA
agtgcaccccacttacttag

SEQ ID NO: 36803 - DNA, 20 bp, synthetic construct
  misc_feature 1..20: note = Description of Artificial Sequence: Synthetic oligonucleotide
  misc_feature 1..20: note = Target: FXN; (+) strand; PAM type: YTN; PAM sequence: CTT
  source 1..20: mol_type = other DNA
acttagaactcggtgacatg

SEQ ID NO: 36804 - DNA, 20 bp, synthetic construct
  misc_feature 1..20: note = Description of Artificial Sequence: Synthetic oligonucleotide
  misc_feature 1..20: note = Target: FXN; (+) strand; PAM type: YTN; PAM sequence: TTA
  source 1..20: mol_type = other DNA
cttagaactcggtgacatga

SEQ ID NO: 36805 - DNA, 20 bp, synthetic construct
  misc_feature 1..20: note = Description of Artificial Sequence: Synthetic oligonucleotide
  misc_feature 1..20: note = Target: FXN; (+) strand; PAM type: YTN; PAM sequence: CTT
  source 1..20: mol_type = other DNA
agaactcggtgacatgatgt

SEQ ID NO: 36806 - DNA, 20 bp, synthetic construct
  misc_feature 1..20: note = Description of Artificial Sequence: Synthetic oligonucleotide
  misc_feature 1..20: note = Target: FXN; (+) strand; PAM type: YTN; PAM sequence: TTA
  source 1..20: mol_type = other DNA
gaactcggtgacatgatgta

SEQ ID NO: 36807 - DNA, 20 bp, synthetic construct
  misc_feature 1..20: note = Description of Artificial Sequence: Synthetic oligonucleotide
  misc_feature 1..20: note = Target: FXN; (+) strand; PAM type: YTN; PAM sequence: CTC
  source 1..20: mol_type = other DNA
ggtgacatgatgtactcctt

SEQ ID NO: 36808 - DNA, 20 bp, synthetic construct
  misc_feature 1..20: note = Description of Artificial Sequence: Synthetic oligonucleotide
  misc_feature 1..20: note = Target: FXN; (+) strand; PAM type: YTN; PAM sequence: CTC
  source 1..20: mol_type = other DNA
ctttatctgggacacagcac

SEQ ID NO: 36809 - DNA, 20 bp, synthetic construct
  misc_feature 1..20: note = Description of Artificial Sequence: Synthetic oligonucleotide
  misc_feature 1..20: note = Target: FXN; (+) strand; PAM type: YTN; PAM sequence: CTT
  source 1..20: mol_type = other DNA
tatctgggacacagcacaaa

SEQ ID NO: 36810 - DNA, 20 bp, synthetic construct
  misc_feature 1..20: note = Description of Artificial Sequence: Synthetic oligonucleotide
  misc_feature 1..20: note = Target: FXN; (+) strand; PAM type: YTN; PAM sequence: TTT
  source 1..20: mol_type = other DNA
atctgggacacagcacaaaa

SEQ ID NO: 36811 - DNA, 20 bp, synthetic construct
  misc_feature 1..20: note = Description of Artificial Sequence: Synthetic oligonucleotide
  misc_feature 1..20: note = Target: FXN; (+) strand; PAM type: YTN; PAM sequence: TTA
  source 1..20: mol_type = other DNA
tctgggacacagcacaaaag

SEQ ID NO: 36812 - DNA, 20 bp, synthetic construct
  misc_feature 1..20: note = Description of Artificial Sequence: Synthetic oligonucleotide
  misc_feature 1..20: note = Target: FXN; (+) strand; PAM type: YTN; PAM sequence: CTG
  source 1..20: mol_type = other DNA
ggacacagcacaaaagaggt

SEQ ID NO: 36813 - DNA, 20 bp, synthetic construct
  misc_feature 1..20: note = Description of Artificial Sequence: Synthetic oligonucleotide
  misc_feature 1..20: note = Target: FXN; (+) strand; PAM type: YTN; PAM sequence: CTG
  source 1..20: mol_type = other DNA
ctctgacatgaaagtggaag

SEQ ID NO: 36814 - DNA, 20 bp, synthetic construct
  misc_feature 1..20: note = Description of Artificial Sequence: Synthetic oligonucleotide
  misc_feature 1..20: note = Target: FXN; (+) strand; PAM type: YTN; PAM sequence: CTC
  source 1..20: mol_type = other DNA
tgacatgaaagtggaagtta

SEQ ID NO: 36815 - DNA, 20 bp, synthetic construct
  misc_feature 1..20: note = Description of Artificial Sequence: Synthetic oligonucleotide
  misc_feature 1..20: note = Target: FXN; (+) strand; PAM type: YTN; PAM sequence: CTG
  source 1..20: mol_type = other DNA
acatgaaagtggaagttaag

SEQ ID NO: 36816 - DNA, 20 bp, synthetic construct
  misc_feature 1..20: note = Description of Artificial Sequence: Synthetic oligonucleotide
  misc_feature 1..20: note = Target: FXN; (+) strand; PAM type: YTN; PAM sequence: TTA
  source 1..20: mol_type = other DNA
aggaatctgggctcttatgg

SEQ ID NO: 36817 - DNA, 20 bp, synthetic construct
  misc_feature 1..20: note = Description of Artificial Sequence: Synthetic oligonucleotide
  misc_feature 1..20: note = Target: FXN; (+) strand; PAM type: YTN; PAM sequence: CTG
  source 1..20: mol_type = other DNA
ggctcttatggggtccttgt

SEQ ID NO: 36818 - DNA, 20 bp, synthetic construct
  misc_feature 1..20: note = Description of Artificial Sequence: Synthetic oligonucleotide
  misc_feature 1..20: note = Target: FXN; (+) strand; PAM type: YTN; PAM sequence: CTC
  source 1..20: mol_type = other DNA
ttatggggtccttgtgggcc

SEQ ID NO: 36819 - DNA, 20 bp, synthetic construct
  misc_feature 1..20: note = Description of Artificial Sequence: Synthetic oligonucleotide
  misc_feature 1..20: note = Target: FXN; (+) strand; PAM type: YTN; PAM sequence: CTT
  source 1..20: mol_type = other DNA
atggggtccttgtgggccag

SEQ ID NO: 36820 - DNA, 20 bp, synthetic construct
  misc_feature 1..20: note = Description of Artificial Sequence: Synthetic oligonucleotide
  misc_feature 1..20: note = Target: FXN; (+) strand; PAM type: YTN; PAM sequence: TTA
  source 1..20: mol_type = other DNA
tggggtccttgtgggccagc

SEQ ID NO: 36821 - DNA, 20 bp, synthetic construct
  misc_feature 1..20: note = Description of Artificial Sequence: Synthetic oligonucleotide
  misc_feature 1..20: note = Target: FXN; (+) strand; PAM type: YTN; PAM sequence: CTT
  source 1..20: mol_type = other DNA
gtgggccagcccttcaggcc

SEQ ID NO: 36822 - DNA, 20 bp, synthetic construct
  misc_feature 1..20: note = Description of Artificial Sequence: Synthetic oligonucleotide
  misc_feature 1..20: note = Target: FXN; (+) strand; PAM type: YTN; PAM sequence: TTG
  source 1..20: mol_type = other DNA
tgggccagcccttcaggcct

SEQ ID NO: 36823 - DNA, 20 bp, synthetic construct
  misc_feature 1..20: note = Description of Artificial Sequence: Synthetic oligonucleotide
  misc_feature 1..20: note = Target: FXN; (+) strand; PAM type: YTN; PAM sequence: CTT
  source 1..20: mol_type = other DNA
caggcctattttactttcat

SEQ ID NO: 36824 - DNA, 20 bp, synthetic construct
  misc_feature 1..20: note = Description of Artificial Sequence: Synthetic oligonucleotide
  misc_feature 1..20: note = Target: FXN; (+) strand; PAM type: YTN; PAM sequence: TTC
  source 1..20: mol_type = other DNA
aggcctattttactttcatt

SEQ ID NO: 36825 - DNA, 20 bp, synthetic construct
  misc_feature 1..20: note = Description of Artificial Sequence: Synthetic oligonucleotide
  misc_feature 1..20: note = Target: FXN; (+) strand; PAM type: YTN; PAM sequence: CTA
  source 1..20: mol_type = other DNA
ttttactttcattttacata

SEQ ID NO: 36826 - DNA, 20 bp, synthetic construct
  misc_feature 1..20: note = Description of Artificial Sequence: Synthetic oligonucleotide
  misc_feature 1..20: note = Target: FXN; (+) strand; PAM type: YTN; PAM sequence: TTT
  source 1..20: mol_type = other DNA
tactttcattttacatatag

SEQ ID NO: 36827 - DNA, 20 bp, synthetic construct
  misc_feature 1..20: note = Description of Artificial Sequence: Synthetic oligonucleotide
  misc_feature 1..20: note = Target: FXN; (+) strand; PAM type: YTN; PAM sequence: TTT
  source 1..20: mol_type = other DNA
actttcattttacatatagc

SEQ ID NO: 36828 - DNA, 20 bp, synthetic construct
  misc_feature 1..20: note = Description of Artificial Sequence: Synthetic oligonucleotide
  misc_feature 1..20: note = Target: FXN; (+) strand; PAM type: YTN; PAM sequence: TTA
  source 1..20: mol_type = other DNA
ctttcattttacatatagct

SEQ ID NO: 36829 - DNA, 20 bp, synthetic construct
  misc_feature 1..20: note = Description of Artificial Sequence: Synthetic oligonucleotide
  misc_feature 1..20: note = Target: FXN; (+) strand; PAM type: YTN; PAM sequence: CTT
  source 1..20: mol_type = other DNA
tcattttacatatagctcta

SEQ ID NO: 36830 - DNA, 20 bp, synthetic construct
  misc_feature 1..20: note = Description of Artificial Sequence: Synthetic oligonucleotide
  misc_feature 1..20: note = Target: FXN; (+) strand; PAM type: YTN; PAM sequence: TTT
  source 1..20: mol_type = other DNA
cattttacatatagctctaa

SEQ ID NO: 36831 - DNA, 20 bp, synthetic construct
  misc_feature 1..20: note = Description of Artificial Sequence: Synthetic oligonucleotide
  misc_feature 1..20: note = Target: FXN; (+) strand; PAM type: YTN; PAM sequence: TTC
  source 1..20: mol_type = other DNA
attttacatatagctctaat

SEQ ID NO: 36832 - DNA, 20 bp, synthetic construct
  misc_feature 1..20: note = Description of Artificial Sequence: Synthetic oligonucleotide
  misc_feature 1..20: note = Target: FXN; (+) strand; PAM type: YTN; PAM sequence: TTT
  source 1..20: mol_type = other DNA
tacatatagctctaattggt

SEQ ID NO: 36833 - DNA, 20 bp, synthetic construct
  misc_feature 1..20: note = Description of Artificial Sequence: Synthetic oligonucleotide
  misc_feature 1..20: note = Target: FXN; (+) strand; PAM type: YTN; PAM sequence: TTT
  source 1..20: mol_type = other DNA
acatatagctctaattggtt

SEQ ID NO: 36834 - DNA, 20 bp, synthetic construct
  misc_feature 1..20: note = Description of Artificial Sequence: Synthetic oligonucleotide
  misc_feature 1..20: note = Target: FXN; (+) strand; PAM type: YTN; PAM sequence: TTA
  source 1..20: mol_type = other DNA
catatagctctaattggttt

SEQ ID NO: 36835 - DNA, 20 bp, synthetic construct
  misc_feature 1..20: note = Description of Artificial Sequence: Synthetic oligonucleotide
  misc_feature 1..20: note = Target: FXN; (+) strand; PAM type: YTN; PAM sequence: CTC
  source 1..20: mol_type = other DNA
taattggtttgattatctcg

SEQ ID NO: 36836 - DNA, 20 bp, synthetic construct
  misc_feature 1..20: note = Description of Artificial Sequence: Synthetic oligonucleotide
  misc_feature 1..20: note = Target: FXN; (+) strand; PAM type: YTN; PAM sequence: CTA
  source 1..20: mol_type = other DNA
attggtttgattatctcgtt

SEQ ID NO: 36837 - DNA, 20 bp, synthetic construct
  misc_feature 1..20: note = Description of Artificial Sequence: Synthetic oligonucleotide
  misc_feature 1..20: note = Target: FXN; (+) strand; PAM type: YTN; PAM sequence: TTG
  source 1..20: mol_type = other DNA
gtttgattatctcgttccca

SEQ ID NO: 36838 - DNA, 20 bp, synthetic construct
  misc_feature 1..20: note = Description of Artificial Sequence: Synthetic oligonucleotide
  misc_feature 1..20: note = Target: FXN; (+) strand; PAM type: YTN; PAM sequence: TTT
  source 1..20: mol_type = other DNA
gattatctcgttcccaaggc

SEQ ID NO: 36839 - DNA, 20 bp, synthetic construct
  misc_feature 1..20: note = Description of Artificial Sequence: Synthetic oligonucleotide
  misc_feature 1..20: note = Target: FXN; (+) strand; PAM type: YTN; PAM sequence: TTG
  source 1..20: mol_type = other DNA
attatctcgttcccaaggca

SEQ ID NO: 36840 - DNA, 20 bp, synthetic construct
  misc_feature 1..20: note = Description of Artificial Sequence: Synthetic oligonucleotide
  misc_feature 1..20: note = Target: FXN; (+) strand; PAM type: YTN; PAM sequence: TTA
  source 1..20: mol_type = other DNA
tctcgttcccaaggcagtgg

SEQ ID NO: 36841 - DNA, 20 bp, synthetic construct
  misc_feature 1..20: note = Description of Artificial Sequence: Synthetic oligonucleotide
  misc_feature 1..20: note = Target: FXN; (+) strand; PAM type: YTN; PAM sequence: CTC
  source 1..20: mol_type = other DNA
gttcccaaggcagtgggaga

SEQ ID NO: 36842 - DNA, 20 bp, synthetic construct
  misc_feature 1..20: note = Description of Artificial Sequence: Synthetic oligonucleotide
  misc_feature 1..20: note = Target: FXN; (+) strand; PAM type: YTN; PAM sequence: TTC
  source 1..20: mol_type = other DNA
ccaaggcagtgggagatccc

SEQ ID NO: 36843 - DNA, 20 bp, synthetic construct
  misc_feature 1..20: note = Description of Artificial Sequence: Synthetic oligonucleotide
  misc_feature 1..20: note = Target: FXN; (+) strand; PAM type: YTN; PAM sequence: TTT
  source 1..20: mol_type = other DNA
aaggaaagaaaaggggcctg

SEQ ID NO: 36844 - DNA, 20 bp, synthetic construct
  misc_feature 1..20: note = Description of Artificial Sequence: Synthetic oligonucleotide
  misc_feature 1..20: note = Target: FXN; (+) strand; PAM type: YTN; PAM sequence: TTA
  source 1..20: mol_type = other DNA
aggaaagaaaaggggcctgg

SEQ ID NO: 36845 - DNA, 20 bp, synthetic construct
  misc_feature 1..20: note = Description of Artificial Sequence: Synthetic oligonucleotide
  misc_feature 1..20: note = Target: FXN; (+) strand; PAM type: YTN; PAM sequence: CTG
  source 1..20: mol_type = other DNA
gcacagtggctcatgcctgt

SEQ ID NO: 36846 - DNA, 20 bp, synthetic construct
  misc_feature 1..20: note = Description of Artificial Sequence: Synthetic oligonucleotide
  misc_feature 1..20: note = Target: FXN; (+) strand; PAM type: YTN; PAM sequence: CTC
  source 1..20: mol_type = other DNA
atgcctgtaatcccagcact

SEQ ID NO: 36847 - DNA, 20 bp, synthetic construct
  misc_feature 1..20: note = Description of Artificial Sequence: Synthetic oligonucleotide
  misc_feature 1..20: note = Target: FXN; (+) strand; PAM type: YTN; PAM sequence: CTG
  source 1..20: mol_type = other DNA
taatcccagcactttgggag

SEQ ID NO: 36848 - DNA, 20 bp, synthetic construct
  misc_feature 1..20: note = Description of Artificial Sequence: Synthetic oligonucleotide
  misc_feature 1..20: note = Target: FXN; (+) strand; PAM type: YTN; PAM sequence: CTT
  source 1..20: mol_type = other DNA
tgggaggctgaggcaagtgt

SEQ ID NO: 36849 - DNA, 20 bp, synthetic construct
  misc_feature 1..20: note = Description of Artificial Sequence: Synthetic oligonucleotide
  misc_feature 1..20: note = Target: FXN; (+) strand; PAM type: YTN; PAM sequence: TTT
  source 1..20: mol_type = other DNA
gggaggctgaggcaagtgta

SEQ ID NO: 36850 - DNA, 20 bp, synthetic construct
  misc_feature 1..20: note = Description of Artificial Sequence: Synthetic oligonucleotide
  misc_feature 1..20: note = Target: FXN; (+) strand; PAM type: YTN; PAM sequence: TTG
  source 1..20: mol_type = other DNA
ggaggctgaggcaagtgtat

SEQ ID NO: 36851 - DNA, 20 bp, synthetic construct
  misc_feature 1..20: note = Description of Artificial Sequence: Synthetic oligonucleotide
  misc_feature 1..20: note = Target: FXN; (+) strand; PAM type: YTN; PAM sequence: CTG
  source 1..20: mol_type = other DNA
aggcaagtgtatcacctgag

SEQ ID NO: 36852 - DNA, 20 bp, synthetic construct
  misc_feature 1..20: note = Description of Artificial Sequence: Synthetic oligonucleotide
  misc_feature 1..20: note = Target: FXN; (+) strand; PAM type: YTN; PAM sequence: CTG
  source 1..20: mol_type = other DNA
aggtcaggagttcaagacca

SEQ ID NO: 36853 - DNA, 20 bp, synthetic construct
  misc_feature 1..20: note = Description of Artificial Sequence: Synthetic oligonucleotide
  misc_feature 1..20: note = Target: FXN; (+) strand; PAM type: YTN; PAM sequence: TTC
  source 1..20: mol_type = other DNA
aagaccagcctggccaacat

SEQ ID NO: 36854 - DNA, 20 bp, synthetic construct
  misc_feature 1..20: note = Description of Artificial Sequence: Synthetic oligonucleotide
  misc_feature 1..20: note = Target: FXN; (+) strand; PAM type: YTN; PAM sequence: CTG
  source 1..20: mol_type = other DNA
gccaacatggcaaaatcccg

SEQ ID NO: 36855 - DNA, 20 bp, synthetic construct
  misc_feature 1..20: note = Description of Artificial Sequence: Synthetic oligonucleotide
  misc_feature 1..20: note = Target: FXN; (+) strand; PAM type: YTN; PAM sequence: CTC
  source 1..20: mol_type = other DNA
tactaaaaatattaaaaaat

SEQ ID NO: 36856 - DNA, 20 bp, synthetic construct
  misc_feature 1..20: note = Description of Artificial Sequence: Synthetic oligonucleotide
  misc_feature 1..20: note = Target: FXN; (+) strand; PAM type: YTN; PAM sequence: CTA
  source 1..20: mol_type = other DNA
ctaaaaatattaaaaaattg

SEQ ID NO: 36857 - DNA, 20 bp, synthetic construct
  misc_feature 1..20: note = Description of Artificial Sequence: Synthetic oligonucleotide
  misc_feature 1..20: note = Target: FXN; (+) strand; PAM type: YTN; PAM sequence: CTA
  source 1..20: mol_type = other DNA
aaaatattaaaaaattggct

SEQ ID NO: 36858 - DNA, 20 bp, synthetic construct
  misc_feature 1..20: note = Description of Artificial Sequence: Synthetic oligonucleotide
  misc_feature 1..20: note = Target: FXN; (+) strand; PAM type: YTN; PAM sequence: TTA
  source 1..20: mol_type = other DNA
aaaaattggctgggcgtggt

SEQ ID NO: 36859 - DNA, 20 bp, synthetic construct
  misc_feature 1..20: note = Description of Artificial Sequence: Synthetic oligonucleotide
  misc_feature 1..20: note = Target: FXN; (+) strand; PAM type: YTN; PAM sequence: TTG
  source 1..20: mol_type = other DNA
gctgggcgtggtggttcgtg

SEQ ID NO: 36860 - DNA, 20 bp, synthetic construct
  misc_feature 1..20: note = Description of Artificial Sequence: Synthetic oligonucleotide
  misc_feature 1..20: note = Target: FXN; (+) strand; PAM type: YTN; PAM sequence: CTG
  source 1..20: mol_type = other DNA
ggcgtggtggttcgtgccta

SEQ ID NO: 36861 - DNA, 20 bp, synthetic construct
  misc_feature 1..20: note = Description of Artificial Sequence: Synthetic oligonucleotide
  misc_feature 1..20: note = Target: FXN; (+) strand; PAM type: YTN; PAM sequence: TTC
  source 1..20: mol_type = other DNA
gtgcctataatttcagctac

SEQ ID NO: 36862 - DNA, 20 bp, synthetic construct
  misc_feature 1..20: note = Description of Artificial Sequence: Synthetic oligonucleotide
  misc_feature 1..20: note = Target: FXN; (+) strand; PAM type: YTN; PAM sequence: CTA
  source 1..20: mol_type = other DNA
taatttcagctactcaggag

SEQ ID NO: 36863 - DNA, 20 bp, synthetic construct
  misc_feature 1..20: note = Description of Artificial Sequence: Synthetic oligonucleotide
  misc_feature 1..20: note = Target: FXN; (+) strand; PAM type: YTN; PAM sequence: TTT
  source 1..20: mol_type = other DNA
cagctactcaggaggctgag

SEQ ID NO: 36864 - DNA, 20 bp, synthetic construct
  misc_feature 1..20: note = Description of Artificial Sequence: Synthetic oligonucleotide
  misc_feature 1..20: note = Target: FXN; (+) strand; PAM type: YTN; PAM sequence: TTC
  source 1..20: mol_type = other DNA
agctactcaggaggctgagg

SEQ ID NO: 36865 - DNA, 20 bp, synthetic construct
  misc_feature 1..20: note = Description of Artificial Sequence: Synthetic oligonucleotide
  misc_feature 1..20: note = Target: FXN; (+) strand; PAM type: YTN; PAM sequence: CTA
  source 1..20: mol_type = other DNA
ctcaggaggctgaggcagga

SEQ ID NO: 36866 - DNA, 20 bp, synthetic construct
  misc_feature 1..20: note = Description of Artificial Sequence: Synthetic oligonucleotide
  misc_feature 1..20: note = Target: FXN; (+) strand; PAM type: YTN; PAM sequence: CTC
  source 1..20: mol_type = other DNA
aggaggctgaggcaggagaa

SEQ ID NO: 36867 - DNA, 20 bp, synthetic construct
  misc_feature 1..20: note = Description of Artificial Sequence: Synthetic oligonucleotide
  misc_feature 1..20: note = Target: FXN; (+) strand; PAM type: YTN; PAM sequence: CTG
  source 1..20: mol_type = other DNA
aggcaggagaatcgctgtaa

SEQ ID NO: 36868 - DNA, 20 bp, synthetic construct
  misc_feature 1..20: note = Description of Artificial Sequence: Synthetic oligonucleotide
  misc_feature 1..20: note = Target: FXN; (+) strand; PAM type: YTN; PAM sequence: CTG
  source 1..20: mol_type = other DNA
taacctggggggtggaggtt

SEQ ID NO: 36869 - DNA, 20 bp, synthetic construct
  misc_feature 1..20: note = Description of Artificial Sequence: Synthetic oligonucleotide
  misc_feature 1..20: note = Target: FXN; (+) strand; PAM type: YTN; PAM sequence: CTG
  source 1..20: mol_type = other DNA
gggggtggaggttgcagtga

SEQ ID NO: 36870 - DNA, 20 bp, synthetic construct
  misc_feature 1..20: note = Description of Artificial Sequence: Synthetic oligonucleotide
  misc_feature 1..20: note = Target: FXN; (+) strand; PAM type: YTN; PAM sequence: TTG
  source 1..20: mol_type = other DNA
cagtgagacgagatcatgcc

SEQ ID NO: 36871 - DNA, 20 bp, synthetic construct
  misc_feature 1..20: note = Description of Artificial Sequence: Synthetic oligonucleotide
  misc_feature 1..20: note = Target: FXN; (+) strand; PAM type: YTN; PAM sequence: CTT
  source 1..20: mol_type = other DNA
cactccagcctggccaacag

SEQ ID NO: 36872 - DNA, 20 bp, synthetic construct
  misc_feature 1..20: note = Description of Artificial Sequence: Synthetic oligonucleotide
  misc_feature 1..20: note = Target: FXN; (+) strand; PAM type: YTN; PAM sequence: TTC
  source 1..20: mol_type = other DNA
actccagcctggccaacaga

SEQ ID NO: 36873 - DNA, 20 bp, synthetic construct
  misc_feature 1..20: note = Description of Artificial Sequence: Synthetic oligonucleotide
  misc_feature 1..20: note = Target: FXN; (+) strand; PAM type: YTN; PAM sequence: CTC
  source 1..20: mol_type = other DNA
cagcctggccaacagagcca

SEQ ID NO: 36874 - DNA, 20 bp, synthetic construct
  misc_feature 1..20: note = Description of Artificial Sequence: Synthetic oligonucleotide
  misc_feature 1..20: note = Target: FXN; (+) strand; PAM type: YTN; PAM sequence: CTG
  source 1..20: mol_type = other DNA
gccaacagagccatactccg

SEQ ID NO: 36875 - DNA, 20 bp, synthetic construct
  misc_feature 1..20: note = Description of Artificial Sequence: Synthetic oligonucleotide
  misc_feature 1..20: note = Target: FXN; (+) strand; PAM type: YTN; PAM sequence: CTC
  source 1..20: mol_type = other DNA
cgtctcaaataaataaataa

SEQ ID NO: 36876 - DNA, 20 bp, synthetic construct
  misc_feature 1..20: note = Description of Artificial Sequence: Synthetic oligonucleotide
  misc_feature 1..20: note = Target: FXN; (+) strand; PAM type: YTN; PAM sequence: CTC
  source 1..20: mol_type = other DNA
aaataaataaataaataaat

SEQ ID NO: 36877 - DNA, 20 bp, synthetic construct
  misc_feature 1..20: note = Description of Artificial Sequence: Synthetic oligonucleotide
  misc_feature 1..20: note = Target: FXN; (+) strand; PAM type: YTN; PAM sequence: CTT
  source 1..20: mol_type = other DNA
caaacacatgaacagcagcc

SEQ ID NO: 36878 - DNA, 20 bp, synthetic construct
  misc_feature 1..20: note = Description of Artificial Sequence: Synthetic oligonucleotide
  misc_feature 1..20: note = Target: FXN; (+) strand; PAM type: YTN; PAM sequence: TTC
  source 1..20: mol_type = other DNA
aaacacatgaacagcagcca

SEQ ID NO: 36879 - DNA, 20 bp, synthetic construct
  misc_feature 1..20: note = Description of Artificial Sequence: Synthetic oligonucleotide
  misc_feature 1..20: note = Target: FXN; (+) strand; PAM type: YTN; PAM sequence: TTC
  source 1..20: mol_type = other DNA
tgtcaagcaaactggaaaag

SEQ ID NO: 36880 - DNA, 20 bp, synthetic construct
  misc_feature 1..20: note = Description of Artificial Sequence: Synthetic oligonucleotide
  misc_feature 1..20: note = Target: FXN; (+) strand; PAM type: YTN; PAM sequence: CTG
  source 1..20: mol_type = other DNA
tcaagcaaactggaaaagta

SEQ ID NO: 36881 - DNA, 20 bp, synthetic construct
  misc_feature 1..20: note = Description of Artificial Sequence: Synthetic oligonucleotide
  misc_feature 1..20: note = Target: FXN; (+) strand; PAM type: YTN; PAM sequence: CTG
  source 1..20: mol_type = other DNA
gaaaagtaccactgtgtgta

SEQ ID NO: 36882 - DNA, 20 bp, synthetic construct
  misc_feature 1..20: note = Description of Artificial Sequence: Synthetic oligonucleotide
  misc_feature 1..20: note = Target: FXN; (+) strand; PAM type: YTN; PAM sequence: CTG
  source 1..20: mol_type = other DNA
tgtgtaccaatagcctcccc

SEQ ID NO: 36883 - DNA, 20 bp, synthetic construct
  misc_feature 1..20: note = Description of Artificial Sequence: Synthetic oligonucleotide
  misc_feature 1..20: note = Target: FXN; (+) strand; PAM type: YTN; PAM sequence: CTC
  source 1..20: mol_type = other DNA
cccaccacagaccctgggag

SEQ ID NO: 36884 - DNA, 20 bp, synthetic construct
  misc_feature 1..20: note = Description of Artificial Sequence: Synthetic oligonucleotide
  misc_feature 1..20: note = Target: FXN; (+) strand; PAM type: YTN; PAM sequence: CTG
  source 1..20: mol_type = other DNA
ggagcatcgcctcatttatg

SEQ ID NO: 36885 - DNA, 20 bp, synthetic construct
  misc_feature 1..20: note = Description of Artificial Sequence: Synthetic oligonucleotide
  misc_feature 1..20: note = Target: FXN; (+) strand; PAM type: YTN; PAM sequence: CTC
  source 1..20: mol_type = other DNA
atttatggtgtggtccagtc

SEQ ID NO: 36886 - DNA, 20 bp, synthetic construct
  misc_feature 1..20: note = Description of Artificial Sequence: Synthetic oligonucleotide
  misc_feature 1..20: note = Target: FXN; (+) strand; PAM type: YTN; PAM sequence: TTT
  source 1..20: mol_type = other DNA
atggtgtggtccagtcatcc

SEQ ID NO: 36887 - DNA, 20 bp, synthetic construct
  misc_feature 1..20: note = Description of Artificial Sequence: Synthetic oligonucleotide
  misc_feature 1..20: note = Target: FXN; (+) strand; PAM type: YTN; PAM sequence: TTA
  source 1..20: mol_type = other DNA
tggtgtggtccagtcatcca

SEQ ID NO: 36888 - DNA, 20 bp, synthetic construct
  misc_feature 1..20: note = Description of Artificial Sequence: Synthetic oligonucleotide
  misc_feature 1..20: note = Target: FXN; (+) strand; PAM type: YTN; PAM sequence: TTT
  source 1..20: mol_type = other DNA
ccaggaaaaggttattaaat

SEQ ID NO: 36889 - DNA, 20 bp, synthetic construct
  misc_feature 1..20: note = Description of Artificial Sequence: Synthetic oligonucleotide
  misc_feature 1..20: note = Target: FXN; (+) strand; PAM type: YTN; PAM sequence: TTC
  source 1..20: mol_type = other DNA
caggaaaaggttattaaata

SEQ ID NO: 36890 - DNA, 20 bp, synthetic construct
  misc_feature 1..20: note = Description of Artificial Sequence: Synthetic oligonucleotide
  misc_feature 1..20: note = Target: FXN; (+) strand; PAM type: YTN; PAM sequence: TTA
  source 1..20: mol_type = other DNA
ttaaatattcactgtaacat

SEQ ID NO: 36891 - DNA, 20 bp, synthetic construct
  misc_feature 1..20: note = Description of Artificial Sequence: Synthetic oligonucleotide
  misc_feature 1..20: note = Target: FXN; (+) strand; PAM type: YTN; PAM sequence: TTA
  source 1..20: mol_type = other DNA
aatattcactgtaacatact

SEQ ID NO: 36892 - DNA, 20 bp, synthetic construct
  misc_feature 1..20: note = Description of Artificial Sequence: Synthetic oligonucleotide
  misc_feature 1..20: note = Target: FXN; (+) strand; PAM type: YTN; PAM sequence: TTC
  source 1..20: mol_type = other DNA
actgtaacatactggaggag

SEQ ID NO: 36893 - DNA, 20 bp, synthetic construct
  misc_feature 1..20: note = Description of Artificial Sequence: Synthetic oligonucleotide
  misc_feature 1..20: note = Target: FXN; (+) strand; PAM type: YTN; PAM sequence: CTG
  source 1..20: mol_type = other DNA
taacatactggaggaggtga

SEQ ID NO: 36894 - DNA, 20 bp, synthetic construct
  misc_feature 1..20: note = Description of Artificial Sequence: Synthetic oligonucleotide
  misc_feature 1..20: note = Target: FXN; (+) strand; PAM type: YTN; PAM sequence: CTG
  source 1..20: mol_type = other DNA
gaggaggtgaggaattgcat

SEQ ID NO: 36895 - DNA, 20 bp, synthetic construct
  misc_feature 1..20: note = Description of Artificial Sequence: Synthetic oligonucleotide
  misc_feature 1..20: note = Target: FXN; (+) strand; PAM type: YTN; PAM sequence: TTG
  source 1..20: mol_type = other DNA
cataatacaatcttagaaaa

SEQ ID NO: 36896 - DNA, 20 bp, synthetic construct
  misc_feature 1..20: note = Description of Artificial Sequence: Synthetic oligonucleotide
  misc_feature 1..20: note = Target: FXN; (+) strand; PAM type: YTN; PAM sequence: CTT
  source 1..20: mol_type = other DNA
agaaaacttttttttcccct

SEQ ID NO: 36897 - DNA, 20 bp, synthetic construct
  misc_feature 1..20: note = Description of Artificial Sequence: Synthetic oligonucleotide
  misc_feature 1..20: note = Target: FXN; (+) strand; PAM type: YTN; PAM sequence: TTA
  source 1..20: mol_type = other DNA
gaaaacttttttttcccctt

SEQ ID NO: 36898 - DNA, 20 bp, synthetic construct
  misc_feature 1..20: note = Description of Artificial Sequence: Synthetic oligonucleotide
  misc_feature 1..20: note = Target: FXN; (+) strand; PAM type: YTN; PAM sequence: CTT
  source 1..20: mol_type = other DNA
ttttttcccctttctatttt

SEQ ID NO: 36899 - DNA, 20 bp, synthetic construct
  misc_feature 1..20: note = Description of Artificial Sequence: Synthetic oligonucleotide
  misc_feature 1..20: note = Target: FXN; (+) strand; PAM type: YTN; PAM sequence: TTT
  source 1..20: mol_type = other DNA
tttttcccctttctattttt

SEQ ID NO: 36900 - DNA, 20 bp, synthetic construct
  misc_feature 1..20: note = Description of Artificial Sequence: Synthetic oligonucleotide
  misc_feature 1..20: note = Target: FXN; (+) strand; PAM type: YTN; PAM sequence: TTT
  source 1..20: mol_type = other DNA
ttttcccctttctatttttt

SEQ ID NO: 36901 - DNA, 20 bp, synthetic construct
  misc_feature 1..20: note = Description of Artificial Sequence: Synthetic oligonucleotide
  misc_feature 1..20: note = Target: FXN; (+) strand; PAM type: YTN; PAM sequence: TTT
  source 1..20: mol_type = other DNA
tttcccctttctattttttg

SEQ ID NO: 36902 - DNA, 20 bp, synthetic construct
  misc_feature 1..20: note = Description of Artificial Sequence: Synthetic oligonucleotide
  misc_feature 1..20: note = Target: FXN; (+) strand; PAM type: YTN; PAM sequence: TTT
  source 1..20: mol_type = other DNA
ttcccctttctattttttga

SEQ ID NO: 36903 - DNA, 20 bp, synthetic construct
  misc_feature 1..20: note = Description of Artificial Sequence: Synthetic oligonucleotide
  misc_feature 1..20: note = Target: FXN; (+) strand; PAM type: YTN; PAM sequence: TTT
  source 1..20: mol_type = other DNA
tcccctttctattttttgag

SEQ ID NO: 36904 - DNA, 20 bp, synthetic construct
  misc_feature 1..20: note = Description of Artificial Sequence: Synthetic oligonucleotide
  misc_feature 1..20: note = Target: FXN; (+) strand; PAM type: YTN; PAM sequence: TTT
  source 1..20: mol_type = other DNA
cccctttctattttttgaga

SEQ ID NO: 36905 - DNA, 20 bp, synthetic construct
  misc_feature 1..20: note = Description of Artificial Sequence: Synthetic oligonucleotide
  misc_feature 1..20: note = Target: FXN; (+) strand; PAM type: YTN; PAM sequence: TTC
  source 1..20: mol_type = other DNA
ccctttctattttttgagac

SEQ ID NO: 36906 - DNA, 20 bp, synthetic construct
  misc_feature 1..20: note = Description of Artificial Sequence: Synthetic oligonucleotide
  misc_feature 1..20: note = Target: FXN; (+) strand; PAM type: YTN; PAM sequence: CTT
  source 1..20: mol_type = other DNA
tctattttttgagacaggat

SEQ ID NO: 36907 - DNA, 20 bp, synthetic construct
  misc_feature 1..20: note = Description of Artificial Sequence: Synthetic oligonucleotide
  misc_feature 1..20: note = Target: FXN; (+) strand; PAM type: YTN; PAM sequence: TTT
  source 1..20: mol_type = other DNA
ctattttttgagacaggatc

SEQ ID NO: 36908 - DNA, 20 bp, synthetic construct
  misc_feature 1..20: note = Description of Artificial Sequence: Synthetic oligonucleotide
  misc_feature 1..20: note = Target: FXN; (+) strand; PAM type: YTN; PAM sequence: TTC
  source 1..20: mol_type = other DNA
tattttttgagacaggatct

SEQ ID NO: 36909 - DNA, 20 bp, synthetic construct
  misc_feature 1..20: note = Description of Artificial Sequence: Synthetic oligonucleotide
  misc_feature 1..20: note = Target: FXN; (+) strand; PAM type: YTN; PAM sequence: CTA
  source 1..20: mol_type = other DNA
ttttttgagacaggatctca

SEQ ID NO: 36910 - DNA, 20 bp, synthetic construct
  misc_feature 1..20: note = Description of Artificial Sequence: Synthetic oligonucleotide
  misc_feature 1..20: note = Target: FXN; (+) strand; PAM type: YTN; PAM sequence: TTT
  source 1..20: mol_type = other DNA
tttgagacaggatctcactt

SEQ ID NO: 36911 - DNA, 20 bp, synthetic construct
  misc_feature 1..20: note = Description of Artificial Sequence: Synthetic oligonucleotide
  misc_feature 1..20: note = Target: FXN; (+) strand; PAM type: YTN; PAM sequence: TTT
  source 1..20: mol_type = other DNA
ttgagacaggatctcacttt

SEQ ID NO: 36912 - DNA, 20 bp, synthetic construct
  misc_feature 1..20: note = Description of Artificial Sequence: Synthetic oligonucleotide
  misc_feature 1..20: note = Target: FXN; (+) strand; PAM type: YTN; PAM sequence: TTT
  source 1..20: mol_type = other DNA
tgagacaggatctcactttg

SEQ ID NO: 36913 - DNA, 20 bp, synthetic construct
  misc_feature 1..20: note = Description of Artificial Sequence: Synthetic oligonucleotide
  misc_feature 1..20: note = Target: FXN; (+) strand; PAM type: YTN; PAM sequence: TTT
  source 1..20: mol_type = other DNA
gagacaggatctcactttgg

SEQ ID NO: 36914 - DNA, 20 bp, synthetic construct
  misc_feature 1..20: note = Description of Artificial Sequence: Synthetic oligonucleotide
  misc_feature 1..20: note = Target: FXN; (+) strand; PAM type: YTN; PAM sequence: TTG
  source 1..20: mol_type = other DNA
agacaggatctcactttggc

SEQ ID NO: 36915 - DNA, 20 bp, synthetic construct
  misc_feature 1..20: note = Description of Artificial Sequence: Synthetic oligonucleotide
  misc_feature 1..20: note = Target: FXN; (+) strand; PAM type: YTN; PAM sequence: CTC
  source 1..20: mol_type = other DNA
actttggcactcaggctgga

SEQ ID NO: 36916 - DNA, 20 bp, synthetic construct
  misc_feature 1..20: note = Description of Artificial Sequence: Synthetic oligonucleotide
  misc_feature 1..20: note = Target: FXN; (+) strand; PAM type: YTN; PAM sequence: CTT
  source 1..20: mol_type = other DNA
tggcactcaggctggaggac

SEQ ID NO: 36917 - DNA, 20 bp, synthetic construct
  misc_feature 1..20: note = Description of Artificial Sequence: Synthetic oligonucleotide
  misc_feature 1..20: note = Target: FXN; (+) strand; PAM type: YTN; PAM sequence: TTT
  source 1..20: mol_type = other DNA
ggcactcaggctggaggaca

SEQ ID NO: 36918 - DNA, 20 bp, synthetic construct
  misc_feature 1..20: note = Description of Artificial Sequence: Synthetic oligonucleotide
  misc_feature 1..20: note = Target: FXN; (+) strand; PAM type: YTN; PAM sequence: TTG
  source 1..20: mol_type = other DNA
gcactcaggctggaggacag

SEQ ID NO: 36919 - DNA, 20 bp, synthetic construct
  misc_feature 1..20: note = Description of Artificial Sequence: Synthetic oligonucleotide
  misc_feature 1..20: note = Target: FXN; (+) strand; PAM type: YTN; PAM sequence: CTC
  source 1..20: mol_type = other DNA
aggctggaggacagtggtac

SEQ ID NO: 36920 - DNA, 20 bp, synthetic construct
  misc_feature 1..20: note = Description of Artificial Sequence: Synthetic oligonucleotide
  misc_feature 1..20: note = Target: FXN; (+) strand; PAM type: YTN; PAM sequence: CTG
  source 1..20: mol_type = other DNA
gaggacagtggtacaatcaa

SEQ ID NO: 36921 - DNA, 20 bp, synthetic construct
  misc_feature 1..20: note = Description of Artificial Sequence: Synthetic oligonucleotide
  misc_feature 1..20: note = Target: FXN; (+) strand; PAM type: YTN; PAM sequence: CTC
  source 1..20: mol_type = other DNA
atggcagcctcgacctccct

SEQ ID NO: 36922 - DNA, 20 bp, synthetic construct
  misc_feature 1..20: note = Description of Artificial Sequence: Synthetic oligonucleotide
  misc_feature 1..20: note = Target: FXN; (+) strand; PAM type: YTN; PAM sequence: CTC
  source 1..20: mol_type = other DNA
gacctccctgggcttgggca

SEQ ID NO: 36923 - DNA, 20 bp, synthetic construct
  misc_feature 1..20: note = Description of Artificial Sequence: Synthetic oligonucleotide
  misc_feature 1..20: note = Target: FXN; (+) strand; PAM type: YTN; PAM sequence: CTC
  source 1..20: mol_type = other DNA
cctgggcttgggcaatcctc

SEQ ID NO: 36924 - DNA, 20 bp, synthetic construct
  misc_feature 1..20: note = Description of Artificial Sequence: Synthetic oligonucleotide
  misc_feature 1..20: note = Target: FXN; (+) strand; PAM type: YTN; PAM sequence: CTG
  source 1..20: mol_type = other DNA
ggcttgggcaatcctcccac

SEQ ID NO: 36925 - DNA, 20 bp, synthetic construct
  misc_feature 1..20: note = Description of Artificial Sequence: Synthetic oligonucleotide
  misc_feature 1..20: note = Target: FXN; (+) strand; PAM type: YTN; PAM sequence: CTT
  source 1..20: mol_type = other DNA
gggcaatcctcccacaggtg

SEQ ID NO: 36926 - DNA, 20 bp, synthetic construct
  misc_feature 1..20: note = Description of Artificial Sequence: Synthetic oligonucleotide
  misc_feature 1..20: note = Target: FXN; (+) strand; PAM type: YTN; PAM sequence: TTG
  source 1..20: mol_type = other DNA
ggcaatcctcccacaggtgt

SEQ ID NO: 36927 - DNA, 20 bp, synthetic construct
  misc_feature 1..20: note = Description of Artificial Sequence: Synthetic oligonucleotide
  misc_feature 1..20: note = Target: FXN; (+) strand; PAM type: YTN; PAM sequence: CTC
  source 1..20: mol_type = other DNA
ccacaggtgtgcacctccat

SEQ ID NO: 36928 - DNA, 20 bp, synthetic construct
  misc_feature 1..20: note = Description of Artificial Sequence: Synthetic oligonucleotide
  misc_feature 1..20: note = Target: FXN; (+) strand; PAM type: YTN; PAM sequence: CTC
  source 1..20: mol_type = other DNA
catagctggctaatttgtgt

SEQ ID NO: 36929 - DNA, 20 bp, synthetic construct
  misc_feature 1..20: note = Description of Artificial Sequence: Synthetic oligonucleotide
  misc_feature 1..20: note = Target: FXN; (+) strand; PAM type: YTN; PAM sequence: CTG
  source 1..20: mol_type = other DNA
gctaatttgtgtattttttg

SEQ ID NO: 36930 - DNA, 20 bp, synthetic construct
  misc_feature 1..20: note = Description of Artificial Sequence: Synthetic oligonucleotide
  misc_feature 1..20: note = Target: FXN; (+) strand; PAM type: YTN; PAM sequence: CTA
  source 1..20: mol_type = other DNA
atttgtgtattttttgtaga

SEQ ID NO: 36931 - DNA, 20 bp, synthetic construct
  misc_feature 1..20: note = Description of Artificial Sequence: Synthetic oligonucleotide
  misc_feature 1..20: note = Target: FXN; (+) strand; PAM type: YTN; PAM sequence: TTT
  source 1..20: mol_type = other DNA
gtgtattttttgtagagatg

SEQ ID NO: 36932 - DNA, 20 bp, synthetic construct
  misc_feature 1..20: note = Description of Artificial Sequence: Synthetic oligonucleotide
  misc_feature 1..20: note = Target: FXN; (+) strand; PAM type: YTN; PAM sequence: TTG
  source 1..20: mol_type = other DNA
tgtattttttgtagagatgg

SEQ ID NO: 36933 - DNA, 20 bp, synthetic construct
  misc_feature 1..20: note = Description of Artificial Sequence: Synthetic oligonucleotide
  misc_feature 1..20: note = Target: FXN; (+) strand; PAM type: YTN; PAM sequence: TTT
  source 1..20: mol_type = other DNA
tttgtagagatggggtttca

SEQ ID NO: 36934 - DNA, 20 bp, synthetic construct
  misc_feature 1..20: note = Description of Artificial Sequence: Synthetic oligonucleotide
  misc_feature 1..20: note = Target: FXN; (+) strand; PAM type: YTN; PAM sequence: TTT
  source 1..20: mol_type = other DNA
ttgtagagatggggtttcac

SEQ ID NO: 36935 - DNA, 20 bp, synthetic construct
  misc_feature 1..20: note = Description of Artificial Sequence: Synthetic oligonucleotide
  misc_feature 1..20: note = Target: FXN; (+) strand; PAM type: YTN; PAM sequence: TTT
  source 1..20: mol_type = other DNA
tgtagagatggggtttcacc

SEQ ID NO: 36936 - DNA, 20 bp, synthetic construct
  misc_feature 1..20: note = Description of Artificial Sequence: Synthetic oligonucleotide
  misc_feature 1..20: note = Target: FXN; (+) strand; PAM type: YTN; PAM sequence: TTT
  source 1..20: mol_type = other DNA
gtagagatggggtttcacca

SEQ ID NO: 36937 - DNA, 20 bp, synthetic construct
  misc_feature 1..20: note = Description of Artificial Sequence: Synthetic oligonucleotide
  misc_feature 1..20: note = Target: FXN; (+) strand; PAM type: YTN; PAM sequence: TTG
  source 1..20: mol_type = other DNA
tagagatggggtttcaccat

SEQ ID NO: 36938 - DNA, 20 bp, synthetic construct
  misc_feature 1..20: note = Description of Artificial Sequence: Synthetic oligonucleotide
  misc_feature 1..20: note = Target: FXN; (+) strand; PAM type: YTN; PAM sequence: TTT
  source 1..20: mol_type = other DNA
caccatgttgcccaggctgg

SEQ ID NO: 36939 - DNA, 20 bp, synthetic construct
  misc_feature 1..20: note = Description of Artificial Sequence: Synthetic oligonucleotide
  misc_feature 1..20: note = Target: FXN; (+) strand; PAM type: YTN; PAM sequence: TTC
  source 1..20: mol_type = other DNA
accatgttgcccaggctggt

SEQ ID NO: 36940 - DNA, 20 bp, synthetic construct
  misc_feature 1..20: note = Description of Artificial Sequence: Synthetic oligonucleotide
  misc_feature 1..20: note = Target: FXN; (+) strand; PAM type: YTN; PAM sequence: TTG
  source 1..20: mol_type = other DNA
cccaggctggtctctaacac

SEQ ID NO: 36941 - DNA, 20 bp, synthetic construct
  misc_feature 1..20: note = Description of Artificial Sequence: Synthetic oligonucleotide
  misc_feature 1..20: note = Target: FXN; (+) strand; PAM type: YTN; PAM sequence: CTG
  source 1..20: mol_type = other DNA
gtctctaacacttaggctca

SEQ ID NO: 36942 - DNA, 20 bp, synthetic construct
  misc_feature 1..20: note = Description of Artificial Sequence: Synthetic oligonucleotide
  misc_feature 1..20: note = Target: FXN; (+) strand; PAM type: YTN; PAM sequence: CTC
  source 1..20: mol_type = other DNA
taacacttaggctcaagtga

SEQ ID NO: 36943 - DNA, 20 bp, synthetic construct
  misc_feature 1..20: note = Description of Artificial Sequence: Synthetic oligonucleotide
  misc_feature 1..20: note = Target: FXN; (+) strand; PAM type: YTN; PAM sequence: CTA
  source 1..20: mol_type = other DNA
acacttaggctcaagtgatc

SEQ ID NO: 36944 - DNA, 20 bp, synthetic construct
  misc_feature 1..20: note = Description of Artificial Sequence: Synthetic oligonucleotide
  misc_feature 1..20: note = Target: FXN; (+) strand; PAM type: YTN; PAM sequence: CTT
  source 1..20: mol_type = other DNA
aggctcaagtgatccacctg

SEQ ID NO: 36945 - DNA, 20 bp, synthetic construct
  misc_feature 1..20: note = Description of Artificial Sequence: Synthetic oligonucleotide
  misc_feature 1..20: note = Target: FXN; (+) strand; PAM type: YTN; PAM sequence: TTA
  source 1..20: mol_type = other DNA
ggctcaagtgatccacctgc

SEQ ID NO: 36946 - DNA, 20 bp, synthetic construct
  misc_feature 1..20: note = Description of Artificial Sequence: Synthetic oligonucleotide
  misc_feature 1..20: note = Target: FXN; (+) strand; PAM type: YTN; PAM sequence: CTC
  source 1..20: mol_type = other DNA
aagtgatccacctgcctcgt

SEQ ID NO: 36947 - DNA, 20 bp, synthetic construct
  misc_feature 1..20: note = Description of Artificial Sequence: Synthetic oligonucleotide
  misc_feature 1..20: note = Target: FXN; (+) strand; PAM type: YTN; PAM sequence: CTG
  source 1..20: mol_type = other DNA
cctcgtcctcccaagatgct

SEQ ID NO: 36948 - DNA, 20 bp, synthetic construct
  misc_feature 1..20: note = Description of Artificial Sequence: Synthetic oligonucleotide
  misc_feature 1..20: note = Target: FXN; (+) strand; PAM type: YTN; PAM sequence: CTC
  source 1..20: mol_type = other DNA
gtcctcccaagatgctggga

SEQ ID NO: 36949 - DNA, 20 bp, synthetic construct
  misc_feature 1..20: note = Description of Artificial Sequence: Synthetic oligonucleotide
  misc_feature 1..20: note = Target: FXN; (+) strand; PAM type: YTN; PAM sequence: CTC
  source 1..20: mol_type = other DNA
ccaagatgctgggattacag

SEQ ID NO: 36950 - DNA, 20 bp, synthetic construct
  misc_feature 1..20: note = Description of Artificial Sequence: Synthetic oligonucleotide
  misc_feature 1..20: note = Target: FXN; (+) strand; PAM type: YTN; PAM sequence: CTG
  source 1..20: mol_type = other DNA
ggattacaggtgtgtgccac

SEQ ID NO: 36951 - DNA, 20 bp, synthetic construct
  misc_feature 1..20: note = Description of Artificial Sequence: Synthetic oligonucleotide
  misc_feature 1..20: note = Target: FXN; (+) strand; PAM type: YTN; PAM sequence: TTA
  source 1..20: mol_type = other DNA
caggtgtgtgccacaggtgt

SEQ ID NO: 36952 - DNA, 20 bp, synthetic construct
  misc_feature 1..20: note = Description of Artificial Sequence: Synthetic oligonucleotide
  misc_feature 1..20: note = Target: FXN; (+) strand; PAM type: YTN; PAM sequence: TTC
  source 1..20: mol_type = other DNA
atcagaaagctttttctatt

SEQ ID NO: 36953 - DNA, 20 bp, synthetic construct
  misc_feature 1..20: note = Description of Artificial Sequence: Synthetic oligonucleotide
  misc_feature 1..20: note = Target: FXN; (+) strand; PAM type: YTN; PAM sequence: CTT
  source 1..20: mol_type = other DNA
tttctattatttttaccttc

SEQ ID NO: 36954 - DNA, 20 bp, synthetic construct
  misc_feature 1..20: note = Description of Artificial Sequence: Synthetic oligonucleotide
  misc_feature 1..20: note = Target: FXN; (+) strand; PAM type: YTN; PAM sequence: TTT
  source 1..20: mol_type = other DNA
ttctattatttttaccttct

SEQ ID NO: 36955 - DNA, 20 bp, synthetic construct
  misc_feature 1..20: note = Description of Artificial Sequence: Synthetic oligonucleotide
  misc_feature 1..20: note = Target: FXN; (+) strand; PAM type: YTN; PAM sequence: TTT
  source 1..20: mol_type = other DNA
tctattatttttaccttctt

SEQ ID NO: 36956 - DNA, 20 bp, synthetic construct
  misc_feature 1..20: note = Description of Artificial Sequence: Synthetic oligonucleotide
  misc_feature 1..20: note = Target: FXN; (+) strand; PAM type: YTN; PAM sequence: TTT
  source 1..20: mol_type = other DNA
ctattatttttaccttcttg

SEQ ID NO: 36957 - DNA, 20 bp, synthetic construct
  misc_feature 1..20: note = Description of Artificial Sequence: Synthetic oligonucleotide
  misc_feature 1..20: note = Target: FXN; (+) strand; PAM type: YTN; PAM sequence: TTC
  source 1..20: mol_type = other DNA
tattatttttaccttcttga

SEQ ID NO: 36958 - DNA, 20 bp, synthetic construct
  misc_feature 1..20: note = Description of Artificial Sequence: Synthetic oligonucleotide
  misc_feature 1..20: note = Target: FXN; (+) strand; PAM type: YTN; PAM sequence: CTA
  source 1..20: mol_type = other DNA
ttatttttaccttcttgagt

SEQ ID NO: 36959 - DNA, 20 bp, synthetic construct
  misc_feature 1..20: note = Description of Artificial Sequence: Synthetic oligonucleotide
  misc_feature 1..20: note = Target: FXN; (+) strand; PAM type: YTN; PAM sequence: TTA
  source 1..20: mol_type = other DNA
tttttaccttcttgagtggg

SEQ ID NO: 36960 - DNA, 20 bp, synthetic construct
  misc_feature 1..20: note = Description of Artificial Sequence: Synthetic oligonucleotide
  misc_feature 1..20: note = Target: FXN; (+) strand; PAM type: YTN; PAM sequence: TTT
  source 1..20: mol_type = other DNA
ttaccttcttgagtgggtag

SEQ ID NO: 36961 - DNA, 20 bp, synthetic construct
  misc_feature 1..20: note = Description of Artificial Sequence: Synthetic oligonucleotide
  misc_feature 1..20: note = Target: FXN; (+) strand; PAM type: YTN; PAM sequence: TTT
  source 1..20: mol_type = other DNA
taccttcttgagtgggtaga

SEQ ID NO: 36962 - DNA, 20 bp, synthetic construct
  misc_feature 1..20: note = Description of Artificial Sequence: Synthetic oligonucleotide
  misc_feature 1..20: note = Target: FXN; (+) strand; PAM type: YTN; PAM sequence: TTT
  source 1..20: mol_type = other DNA
accttcttgagtgggtagaa

SEQ ID NO: 36963 - DNA, 20 bp, synthetic construct
  misc_feature 1..20: note = Description of Artificial Sequence: Synthetic oligonucleotide
  misc_feature 1..20: note = Target: FXN; (+) strand; PAM type: YTN; PAM sequence: TTA
  source 1..20: mol_type = other DNA
ccttcttgagtgggtagaac

SEQ ID NO: 36964 - DNA, 20 bp, synthetic construct
  misc_feature 1..20: note = Description of Artificial Sequence: Synthetic oligonucleotide
  misc_feature 1..20: note = Target: FXN; (+) strand; PAM type: YTN; PAM sequence: CTT
  source 1..20: mol_type = other DNA
cttgagtgggtagaacctca

SEQ ID NO: 36965 - DNA, 20 bp, synthetic construct
  misc_feature 1..20: note = Description of Artificial Sequence: Synthetic oligonucleotide
  misc_feature 1..20: note = Target: FXN; (+) strand; PAM type: YTN; PAM sequence: TTC
  source 1..20: mol_type = other DNA
ttgagtgggtagaacctcag

SEQ ID NO: 36966 - DNA, 20 bp, synthetic construct
  misc_feature 1..20: note = Description of Artificial Sequence: Synthetic oligonucleotide
  misc_feature 1..20: note = Target: FXN; (+) strand; PAM type: YTN; PAM sequence: CTT
  source 1..20: mol_type = other DNA
gagtgggtagaacctcagcc

SEQ ID NO: 36967 - DNA, 20 bp, synthetic construct
  misc_feature 1..20: note = Description of Artificial Sequence: Synthetic oligonucleotide
  misc_feature 1..20: note = Target: FXN; (+) strand; PAM type: YTN; PAM sequence: TTG
  source 1..20: mol_type = other DNA
agtgggtagaacctcagcca

SEQ ID NO: 36968 - DNA, 20 bp, synthetic construct
  misc_feature 1..20: note = Description of Artificial Sequence: Synthetic oligonucleotide
  misc_feature 1..20: note = Target: FXN; (+) strand; PAM type: YTN; PAM sequence: CTC
  source 1..20: mol_type = other DNA
agccacatagaaaataaaat

SEQ ID NO: 36969 - DNA, 20 bp, synthetic construct
  misc_feature 1..20: note = Description of Artificial Sequence: Synthetic oligonucleotide
  misc_feature 1..20: note = Target: FXN; (+) strand; PAM type: YTN; PAM sequence: TTC
  source 1..20: mol_type = other DNA
tggcatgacttatttagctc

SEQ ID NO: 36970 - DNA, 20 bp, synthetic construct
  misc_feature 1..20: note = Description of Artificial Sequence: Synthetic oligonucleotide
  misc_feature 1..20: note = Target: FXN; (+) strand; PAM type: YTN; PAM sequence: CTG
  source 1..20: mol_type = other DNA
gcatgacttatttagctctc

SEQ ID NO: 36971 - DNA, 20 bp, synthetic construct
  misc_feature 1..20: note = Description of Artificial Sequence: Synthetic oligonucleotide
  misc_feature 1..20: note = Target: FXN; (+) strand; PAM type: YTN; PAM sequence: CTT
  source 1..20: mol_type = other DNA
atttagctctctggaattac

SEQ ID NO: 36972 - DNA, 20 bp, synthetic construct
  misc_feature 1..20: note = Description of Artificial Sequence: Synthetic oligonucleotide
  misc_feature 1..20: note = Target: FXN; (+) strand; PAM type: YTN; PAM sequence: TTA
  source 1..20: mol_type = other DNA
tttagctctctggaattaca

SEQ ID NO: 36973 - DNA, 20 bp, synthetic construct
  misc_feature 1..20: note = Description of Artificial Sequence: Synthetic oligonucleotide
  misc_feature 1..20: note = Target: FXN; (+) strand; PAM type: YTN; PAM sequence: TTT
  source 1..20: mol_type = other DNA
agctctctggaattacaaag

SEQ ID NO: 36974 - DNA, 20 bp, synthetic construct
  misc_feature 1..20: note = Description of Artificial Sequence: Synthetic oligonucleotide
  misc_feature 1..20: note = Target: FXN; (+) strand; PAM type: YTN; PAM sequence: TTA
  source 1..20: mol_type = other DNA
gctctctggaattacaaaga

SEQ ID NO: 36975 - DNA, 20 bp, synthetic construct
  misc_feature 1..20: note = Description of Artificial Sequence: Synthetic oligonucleotide
  misc_feature 1..20: note = Target: FXN; (+) strand; PAM type: YTN; PAM sequence: CTC
  source 1..20: mol_type = other DNA
tctggaattacaaagaagga

SEQ ID NO: 36976 - DNA, 20 bp, synthetic construct
  misc_feature 1..20: note = Description of Artificial Sequence: Synthetic oligonucleotide
  misc_feature 1..20: note = Target: FXN; (+) strand; PAM type: YTN; PAM sequence: CTC
  source 1..20: mol_type = other DNA
tggaattacaaagaaggaat

SEQ ID NO: 36977 - DNA, 20 bp, synthetic construct
  misc_feature 1..20: note = Description of Artificial Sequence: Synthetic oligonucleotide
  misc_feature 1..20: note = Target: FXN; (+) strand; PAM type: YTN; PAM sequence: CTG
  source 1..20: mol_type = other DNA
gaattacaaagaaggaatga

SEQ ID NO: 36978 - DNA, 20 bp, synthetic construct
  misc_feature 1..20: note = Description of Artificial Sequence: Synthetic oligonucleotide
  misc_feature 1..20: note = Target: FXN; (+) strand; PAM type: YTN; PAM sequence: TTA
  source 1..20: mol_type = other DNA
caaagaaggaatgaggtgtg

SEQ ID NO: 36979 - DNA, 20 bp, synthetic construct
  misc_feature 1..20: note = Description of Artificial Sequence: Synthetic oligonucleotide
  misc_feature 1..20: note = Target: FXN; (+) strand; PAM type: YTN; PAM sequence: CTG
  source 1..20: mol_type = other DNA
ggtttttgaatcacaaattt

SEQ ID NO: 36980 - DNA, 20 bp, synthetic construct
  misc_feature 1..20: note = Description of Artificial Sequence: Synthetic oligonucleotide
  misc_feature 1..20: note = Target: FXN; (+) strand; PAM type: YTN; PAM sequence: TTT
  source 1..20: mol_type = other DNA
ttgaatcacaaatttagaat

SEQ ID NO: 36981 - DNA, 20 bp, synthetic construct
  misc_feature 1..20: note = Description of Artificial Sequence: Synthetic oligonucleotide
  misc_feature 1..20: note = Target: FXN; (+) strand; PAM type: YTN; PAM sequence: TTT
  source 1..20: mol_type = other DNA
tgaatcacaaatttagaatt

SEQ ID NO: 36982 - DNA, 20 bp, synthetic construct
  misc_feature 1..20: note = Description of Artificial Sequence: Synthetic oligonucleotide
  misc_feature 1..20: note = Target: FXN; (+) strand; PAM type: YTN; PAM sequence: TTT
  source 1..20: mol_type = other DNA
gaatcacaaatttagaattt

SEQ ID NO: 36983 - DNA, 20 bp, synthetic construct
  misc_feature 1..20: note = Description of Artificial Sequence: Synthetic oligonucleotide
  misc_feature 1..20: note = Target: FXN; (+) strand; PAM type: YTN; PAM sequence: TTG
  source 1..20: mol_type = other DNA
aatcacaaatttagaattta

SEQ ID NO: 36984 - DNA, 20 bp, synthetic construct
  misc_feature 1..20: note = Description of Artificial Sequence: Synthetic oligonucleotide
  misc_feature 1..20: note = Target: FXN; (+) strand; PAM type: YTN; PAM sequence: TTT
  source 1..20: mol_type = other DNA
agaatttaatcgaaactctg

SEQ ID NO: 36985 - DNA, 20 bp, synthetic construct
  misc_feature 1..20: note = Description of Artificial Sequence: Synthetic oligonucleotide
  misc_feature 1..20: note = Target: FXN; (+) strand; PAM type: YTN; PAM sequence: TTA
  source 1..20: mol_type = other DNA
gaatttaatcgaaactctgc

SEQ ID NO: 36986 - DNA, 20 bp, synthetic construct
  misc_feature 1..20: note = Description of Artificial Sequence: Synthetic oligonucleotide
  misc_feature 1..20: note = Target: FXN; (+) strand; PAM type: YTN; PAM sequence: TTT
  source 1..20: mol_type = other DNA
aatcgaaactctgcctctta

SEQ ID NO: 36987 - DNA, 20 bp, synthetic construct
  misc_feature 1..20: note = Description of Artificial Sequence: Synthetic oligonucleotide
  misc_feature 1..20: note = Target: FXN; (+) strand; PAM type: YTN; PAM sequence: TTA
  source 1..20: mol_type = other DNA
atcgaaactctgcctcttac

SEQ ID NO: 36988 - DNA, 20 bp, synthetic construct
  misc_feature 1..20: note = Description of Artificial Sequence: Synthetic oligonucleotide
  misc_feature 1..20: note = Target: FXN; (+) strand; PAM type: YTN; PAM sequence: CTC
  source 1..20: mol_type = other DNA
tgcctcttacttgtttgtag

SEQ ID NO: 36989 - DNA, 20 bp, synthetic construct
  misc_feature 1..20: note = Description of Artificial Sequence: Synthetic oligonucleotide
  misc_feature 1..20: note = Target: FXN; (+) strand; PAM type: YTN; PAM sequence: CTG
  source 1..20: mol_type = other DNA
cctcttacttgtttgtagac

SEQ ID NO: 36990 - DNA, 20 bp, synthetic construct
  misc_feature 1..20: note = Description of Artificial Sequence: Synthetic oligonucleotide
  misc_feature 1..20: note = Target: FXN; (+) strand; PAM type: YTN; PAM sequence: CTC
  source 1..20: mol_type = other DNA
ttacttgtttgtagacactg

SEQ ID NO: 36991 - DNA, 20 bp, synthetic construct
  misc_feature 1..20: note = Description of Artificial Sequence: Synthetic oligonucleotide
  misc_feature 1..20: note = Target: FXN; (+) strand; PAM type: YTN; PAM sequence: CTT
  source 1..20: mol_type = other DNA
acttgtttgtagacactgac

SEQ ID NO: 36992 - DNA, 20 bp, synthetic construct
  misc_feature 1..20: note = Description of Artificial Sequence: Synthetic oligonucleotide
  misc_feature 1..20: note = Target: FXN; (+) strand; PAM type: YTN; PAM sequence: TTA
  source 1..20: mol_type = other DNA
cttgtttgtagacactgaca

SEQ ID NO: 36993 - DNA, 20 bp, synthetic construct
  misc_feature 1..20: note = Description of Artificial Sequence: Synthetic oligonucleotide
  misc_feature 1..20: note = Target: FXN; (+) strand; PAM type: YTN; PAM sequence: CTT
  source 1..20: mol_type = other DNA
gtttgtagacactgacagtg

SEQ ID NO: 36994 - DNA, 20 bp, synthetic construct
  misc_feature 1..20: note = Description of Artificial Sequence: Synthetic oligonucleotide
  misc_feature 1..20: note = Target: FXN; (+) strand; PAM type: YTN; PAM sequence: TTG
  source 1..20: mol_type = other DNA
tttgtagacactgacagtgg

SEQ ID NO: 36995 - DNA, 20 bp, synthetic construct
  misc_feature 1..20: note = Description of Artificial Sequence: Synthetic oligonucleotide
  misc_feature 1..20: note = Target: FXN; (+) strand; PAM type: YTN; PAM sequence: TTT
  source 1..20: mol_type = other DNA
gtagacactgacagtggcct

SEQ ID NO: 36996 - DNA, 20 bp, synthetic construct
  misc_feature 1..20: note = Description of Artificial Sequence: Synthetic oligonucleotide
  misc_feature 1..20: note = Target: FXN; (+) strand; PAM type: YTN; PAM sequence: TTG
  source 1..20: mol_type = other DNA
tagacactgacagtggcctc

SEQ ID NO: 36997 - DNA, 20 bp, synthetic construct
  misc_feature 1..20: note = Description of Artificial Sequence: Synthetic oligonucleotide
  misc_feature 1..20: note = Target: FXN; (+) strand; PAM type: YTN; PAM sequence: CTG
  source 1..20: mol_type = other DNA
acagtggcctcatgtttttt

SEQ ID NO: 36998 - DNA, 20 bp, synthetic construct
  misc_feature 1..20: note = Description of Artificial Sequence: Synthetic oligonucleotide
  misc_feature 1..20: note = Target: FXN; (+) strand; PAM type: YTN; PAM sequence: CTC
  source 1..20: mol_type = other DNA
atgttttttttttttttaat

SEQ ID NO: 36999 - DNA, 20 bp, synthetic construct
  misc_feature 1..20: note = Description of Artificial Sequence: Synthetic oligonucleotide
  misc_feature 1..20: note = Target: FXN; (+) strand; PAM type: YTN; PAM sequence: TTT
  source 1..20: mol_type = other DNA
tttttttttttaatctataa

SEQ ID NO: 37000 - DNA, 20 bp, synthetic construct
  misc_feature 1..20: note = Description of Artificial Sequence: Synthetic oligonucleotide
  misc_feature 1..20: note = Target: FXN; (+) strand; PAM type: YTN; PAM sequence: TTT
  source 1..20: mol_type = other DNA
ttttttttttaatctataaa

SEQ ID NO: 37001 - DNA, 20 bp, synthetic construct
  misc_feature 1..20: note = Description of Artificial Sequence: Synthetic oligonucleotide
  misc_feature 1..20: note = Target: FXN; (+) strand; PAM type: YTN; PAM sequence: TTT
  source 1..20: mol_type = other DNA
tttttttttaatctataaaa

SEQ ID NO: 37002 - DNA, 20 bp, synthetic construct
  misc_feature 1..20: note = Description of Artificial Sequence: Synthetic oligonucleotide
  misc_feature 1..20: note = Target: FXN; (+) strand; PAM type: YTN; PAM sequence: TTT
  source 1..20: mol_type = other DNA
ttttttttaatctataaaat

SEQ ID NO: 37003 - DNA, 20 bp, synthetic construct
  misc_feature 1..20: note = Description of Artificial Sequence: Synthetic oligonucleotide
  misc_feature 1..20: note = Target: FXN; (+) strand; PAM type: YTN; PAM sequence: TTT
  source 1..20: mol_type = other DNA
tttttttaatctataaaatg

SEQ ID NO: 37004 - DNA, 20 bp, synthetic construct
  misc_feature 1..20: note = Description of Artificial Sequence: Synthetic oligonucleotide
  misc_feature 1..20: note = Target: FXN; (+) strand; PAM type: YTN; PAM sequence: TTT
  source 1..20: mol_type = other DNA
ttttttaatctataaaatgg

SEQ ID NO: 37005 - DNA, 20 bp, synthetic construct
  misc_feature 1..20: note = Description of Artificial Sequence: Synthetic oligonucleotide
  misc_feature 1..20: note = Target: FXN; (+) strand; PAM type: YTN; PAM sequence: TTT
  source 1..20: mol_type = other DNA
tttttaatctataaaatgga

SEQ ID NO: 37006 - DNA, 20 bp, synthetic construct
  misc_feature 1..20: note = Description of Artificial Sequence: Synthetic oligonucleotide
  misc_feature 1..20: note = Target: FXN; (+) strand; PAM type: YTN; PAM sequence: TTT
  source 1..20: mol_type = other DNA
ttttaatctataaaatggag

SEQ ID NO: 37007 - DNA, 20 bp, synthetic construct
  misc_feature 1..20: note = Description of Artificial Sequence: Synthetic oligonucleotide
  misc_feature 1..20: note = Target: FXN; (+) strand; PAM type: YTN; PAM sequence: TTT
  source 1..20: mol_type = other DNA
tttaatctataaaatggaga

SEQ ID NO: 37008 - DNA, 20 bp, synthetic construct
  misc_feature 1..20: note = Description of Artificial Sequence: Synthetic oligonucleotide
  misc_feature 1..20: note = Target: FXN; (+) strand; PAM type: YTN; PAM sequence: TTT
  source 1..20: mol_type = other DNA
ttaatctataaaatggagat

SEQ ID NO: 37009 - DNA, 20 bp, synthetic construct
  misc_feature 1..20: note = Description of Artificial Sequence: Synthetic oligonucleotide
  misc_feature 1..20: note = Target: FXN; (+) strand; PAM type: YTN; PAM sequence: TTT
  source 1..20: mol_type = other DNA
taatctataaaatggagata

SEQ ID NO: 37010 - DNA, 20 bp, synthetic construct
  misc_feature 1..20: note = Description of Artificial Sequence: Synthetic oligonucleotide
  misc_feature 1..20: note = Target: FXN; (+) strand; PAM type: YTN; PAM sequence: TTT
  source 1..20: mol_type = other DNA
aatctataaaatggagatat

SEQ ID NO: 37011 - DNA, 20 bp, synthetic construct
  misc_feature 1..20: note = Description of Artificial Sequence: Synthetic oligonucleotide
  misc_feature 1..20: note = Target: FXN; (+) strand; PAM type: YTN; PAM sequence: TTA
  source 1..20: mol_type = other DNA
atctataaaatggagatatc

SEQ ID NO: 37012 - DNA, 20 bp, synthetic construct
  misc_feature 1..20: note = Description of Artificial Sequence: Synthetic oligonucleotide
  misc_feature 1..20: note = Target: FXN; (+) strand; PAM type: YTN; PAM sequence: CTA
  source 1..20: mol_type = other DNA
taaaatggagatatctaaca

SEQ ID NO: 37013 - DNA, 20 bp, synthetic construct
  misc_feature 1..20: note = Description of Artificial Sequence: Synthetic oligonucleotide
  misc_feature 1..20: note = Target: FXN; (+) strand; PAM type: YTN; PAM sequence: CTA
  source 1..20: mol_type = other DNA
acatgttgagcctgggccca

SEQ ID NO: 37014 - DNA, 20 bp, synthetic construct
  misc_feature 1..20: note = Description of Artificial Sequence: Synthetic oligonucleotide
  misc_feature 1..20: note = Target: FXN; (+) strand; PAM type: YTN; PAM sequence: TTG
  source 1..20: mol_type = other DNA
agcctgggcccacaggcaaa

SEQ ID NO: 37015 - DNA, 20 bp, synthetic construct
  misc_feature 1..20: note = Description of Artificial Sequence: Synthetic oligonucleotide
  misc_feature 1..20: note = Target: FXN; (+) strand; PAM type: YTN; PAM sequence: CTG
  source 1..20: mol_type = other DNA
ggcccacaggcaaagcacaa

SEQ ID NO: 37016 - DNA, 20 bp, synthetic construct
  misc_feature 1..20: note = Description of Artificial Sequence: Synthetic oligonucleotide
  misc_feature 1..20: note = Target: FXN; (+) strand; PAM type: YTN; PAM sequence: CTG
  source 1..20: mol_type = other DNA
atgtgagaagtactcagttc

SEQ ID NO: 37017 - DNA, 20 bp, synthetic construct
  misc_feature 1..20: note = Description of Artificial Sequence: Synthetic oligonucleotide
  misc_feature 1..20: note = Target: FXN; (+) strand; PAM type: YTN; PAM sequence: CTC
  source 1..20: mol_type = other DNA
agttcatgacaactgttgtt

SEQ ID NO: 37018 - DNA, 20 bp, synthetic construct
  misc_feature 1..20: note = Description of Artificial Sequence: Synthetic oligonucleotide
  misc_feature 1..20: note = Target: FXN; (+) strand; PAM type: YTN; PAM sequence: TTC
  source 1..20: mol_type = other DNA
atgacaactgttgttctcac

SEQ ID NO: 37019 - DNA, 20 bp, synthetic construct
  misc_feature 1..20: note = Description of Artificial Sequence: Synthetic oligonucleotide
  misc_feature 1..20: note = Target: FXN; (+) strand; PAM type: YTN; PAM sequence: CTG
  source 1..20: mol_type = other DNA
ttgttctcacatgcatagca

SEQ ID NO: 37020 - DNA, 20 bp, synthetic construct
  misc_feature 1..20: note = Description of Artificial Sequence: Synthetic oligonucleotide
  misc_feature 1..20: note = Target: FXN; (+) strand; PAM type: YTN; PAM sequence: TTG
  source 1..20: mol_type = other DNA
ttctcacatgcatagcataa

SEQ ID NO: 37021 - DNA, 20 bp, synthetic construct
  misc_feature 1..20: note = Description of Artificial Sequence: Synthetic oligonucleotide
  misc_feature 1..20: note = Target: FXN; (+) strand; PAM type: YTN; PAM sequence: TTC
  source 1..20: mol_type = other DNA
tcacatgcatagcataattt

SEQ ID NO: 37022 - DNA, 20 bp, synthetic construct
  misc_feature 1..20: note = Description of Artificial Sequence: Synthetic oligonucleotide
  misc_feature 1..20: note = Target: FXN; (+) strand; PAM type: YTN; PAM sequence: CTC
  source 1..20: mol_type = other DNA
acatgcatagcataatttca

SEQ ID NO: 37023 - DNA, 20 bp, synthetic construct
  misc_feature 1..20: note = Description of Artificial Sequence: Synthetic oligonucleotide
  misc_feature 1..20: note = Target: FXN; (+) strand; PAM type: YTN; PAM sequence: TTT
  source 1..20: mol_type = other DNA
catattcacattggaggact

SEQ ID NO: 37024 - DNA, 20 bp, synthetic construct
  misc_feature 1..20: note = Description of Artificial Sequence: Synthetic oligonucleotide
  misc_feature 1..20: note = Target: FXN; (+) strand; PAM type: YTN; PAM sequence: TTC
  source 1..20: mol_type = other DNA
atattcacattggaggactt

SEQ ID NO: 37025 - DNA, 20 bp, synthetic construct
  misc_feature 1..20: note = Description of Artificial Sequence: Synthetic oligonucleotide
  misc_feature 1..20: note = Target: FXN; (+) strand; PAM type: YTN; PAM sequence: TTC
  source 1..20: mol_type = other DNA
acattggaggacttctccca

SEQ ID NO: 37026 - DNA, 20 bp, synthetic construct
  misc_feature 1..20: note = Description of Artificial Sequence: Synthetic oligonucleotide
  misc_feature 1..20: note = Target: FXN; (+) strand; PAM type: YTN; PAM sequence: TTG
  source 1..20: mol_type = other DNA
gaggacttctcccaaaatat

SEQ ID NO: 37027 - DNA, 20 bp, synthetic construct
  misc_feature 1..20: note = Description of Artificial Sequence: Synthetic oligonucleotide
  misc_feature 1..20: note = Target: FXN; (+) strand; PAM type: YTN; PAM sequence: CTT
  source 1..20: mol_type = other DNA
ctcccaaaatatggatgacg

SEQ ID NO: 37028 - DNA, 20 bp, synthetic construct
  misc_feature 1..20: note = Description of Artificial Sequence: Synthetic oligonucleotide
  misc_feature 1..20: note = Target: FXN; (+) strand; PAM type: YTN; PAM sequence: TTC
  source 1..20: mol_type = other DNA
tcccaaaatatggatgacgt

SEQ ID NO: 37029 - DNA, 20 bp, synthetic construct
  misc_feature 1..20: note = Description of Artificial Sequence: Synthetic oligonucleotide
  misc_feature 1..20: note = Target: FXN; (+) strand; PAM type: YTN; PAM sequence: CTC
  source 1..20: mol_type = other DNA
ccaaaatatggatgacgttc

SEQ ID NO: 37030 - DNA, 20 bp, synthetic construct
  misc_feature 1..20: note = Description of Artificial Sequence: Synthetic oligonucleotide
  misc_feature 1..20: note = Target: FXN; (+) strand; PAM type: YTN; PAM sequence: TTC
  source 1..20: mol_type = other DNA
cctactcaaccttgaactta

SEQ ID NO: 37031 - DNA, 20 bp, synthetic construct
  misc_feature 1..20: note = Description of Artificial Sequence: Synthetic oligonucleotide
  misc_feature 1..20: note = Target: FXN; (+) strand; PAM type: YTN; PAM sequence: CTA
  source 1..20: mol_type = other DNA
ctcaaccttgaacttaatca

SEQ ID NO: 37032 - DNA, 20 bp, synthetic construct
  misc_feature 1..20: note = Description of Artificial Sequence: Synthetic oligonucleotide
  misc_feature 1..20: note = Target: FXN; (+) strand; PAM type: YTN; PAM sequence: CTC
  source 1..20: mol_type = other DNA
aaccttgaacttaatcaaaa

SEQ ID NO: 37033 - DNA, 20 bp, synthetic construct
  misc_feature 1..20: note = Description of Artificial Sequence: Synthetic oligonucleotide
  misc_feature 1..20: note = Target: FXN; (+) strand; PAM type: YTN; PAM sequence: CTT
  source 1..20: mol_type = other DNA
gaacttaatcaaaatactca

SEQ ID NO: 37034 - DNA, 20 bp, synthetic construct
  misc_feature 1..20: note = Description of Artificial Sequence: Synthetic oligonucleotide
  misc_feature 1..20: note = Target: FXN; (+) strand; PAM type: YTN; PAM sequence: TTG
  source 1..20: mol_type = other DNA
aacttaatcaaaatactcag

SEQ ID NO: 37035 - DNA, 20 bp, synthetic construct
  misc_feature 1..20: note = Description of Artificial Sequence: Synthetic oligonucleotide
  misc_feature 1..20: note = Target: FXN; (+) strand; PAM type: YTN; PAM sequence: CTT
  source 1..20: mol_type = other DNA
aatcaaaatactcagtttac

SEQ ID NO: 37036 - DNA, 20 bp, synthetic construct
  misc_feature 1..20: note = Description of Artificial Sequence: Synthetic oligonucleotide
  misc_feature 1..20: note = Target: FXN; (+) strand; PAM type: YTN; PAM sequence: TTA
  source 1..20: mol_type = other DNA
atcaaaatactcagtttact

SEQ ID NO: 37037 - DNA, 20 bp, synthetic construct
  misc_feature 1..20: note = Description of Artificial Sequence: Synthetic oligonucleotide
  misc_feature 1..20: note = Target: FXN; (+) strand; PAM type: YTN; PAM sequence: CTC
  source 1..20: mol_type = other DNA
agtttacttaacttcgtatt

SEQ ID NO: 37038 - DNA, 20 bp, synthetic construct
  misc_feature 1..20: note = Description of Artificial Sequence: Synthetic oligonucleotide
  misc_feature 1..20: note = Target: FXN; (+) strand; PAM type: YTN; PAM sequence: TTT
  source 1..20: mol_type = other DNA
acttaacttcgtattagatt

SEQ ID NO: 37039 - DNA, 20 bp, synthetic construct
  misc_feature 1..20: note = Description of Artificial Sequence: Synthetic oligonucleotide
  misc_feature 1..20: note = Target: FXN; (+) strand; PAM type: YTN; PAM sequence: TTA
  source 1..20: mol_type = other DNA
cttaacttcgtattagattc

SEQ ID NO: 37040 - DNA, 20 bp, synthetic construct
  misc_feature 1..20: note = Description of Artificial Sequence: Synthetic oligonucleotide
  misc_feature 1..20: note = Target: FXN; (+) strand; PAM type: YTN; PAM sequence: CTT
  source 1..20: mol_type = other DNA
aacttcgtattagattctga

SEQ ID NO: 37041 - DNA, 20 bp, synthetic construct
  misc_feature 1..20: note = Description of Artificial Sequence: Synthetic oligonucleotide
  misc_feature 1..20: note = Target: FXN; (+) strand; PAM type: YTN; PAM sequence: TTA
  source 1..20: mol_type = other DNA
acttcgtattagattctgat

SEQ ID NO: 37042 - DNA, 20 bp, synthetic construct
  misc_feature 1..20: note = Description of Artificial Sequence: Synthetic oligonucleotide
  misc_feature 1..20: note = Target: FXN; (+) strand; PAM type: YTN; PAM sequence: CTT
  source 1..20: mol_type = other DNA
cgtattagattctgattccc

SEQ ID NO: 37043 - DNA, 20 bp, synthetic construct
  misc_feature 1..20: note = Description of Artificial Sequence: Synthetic oligonucleotide
  misc_feature 1..20: note = Target: FXN; (+) strand; PAM type: YTN; PAM sequence: TTC
  source 1..20: mol_type = other DNA
gtattagattctgattccct

SEQ ID NO: 37044 - DNA, 20 bp, synthetic construct
  misc_feature 1..20: note = Description of Artificial Sequence: Synthetic oligonucleotide
  misc_feature 1..20: note = Target: FXN; (+) strand; PAM type: YTN; PAM sequence: TTA
  source 1..20: mol_type = other DNA
gattctgattccctggaacc

SEQ ID NO: 37045 - DNA, 20 bp, synthetic construct
  misc_feature 1..20: note = Description of Artificial Sequence: Synthetic oligonucleotide
  misc_feature 1..20: note = Target: FXN; (+) strand; PAM type: YTN; PAM sequence: TTC
  source 1..20: mol_type = other DNA
tgattccctggaaccattta

SEQ ID NO: 37046 - DNA, 20 bp, synthetic construct
  misc_feature 1..20: note = Description of Artificial Sequence: Synthetic oligonucleotide
  misc_feature 1..20: note = Target: FXN; (+) strand; PAM type: YTN; PAM sequence: CTG
  source 1..20: mol_type = other DNA
attccctggaaccatttatc

SEQ ID NO: 37047 - DNA, 20 bp, synthetic construct
  misc_feature 1..20: note = Description of Artificial Sequence: Synthetic oligonucleotide
  misc_feature 1..20: note = Target: FXN; (+) strand; PAM type: YTN; PAM sequence: TTC
  source 1..20: mol_type = other DNA
cctggaaccatttatcgtgt

SEQ ID NO: 37048 - DNA, 20 bp, synthetic construct
  misc_feature 1..20: note = Description of Artificial Sequence: Synthetic oligonucleotide
  misc_feature 1..20: note = Target: FXN; (+) strand; PAM type: YTN; PAM sequence: CTG
  source 1..20: mol_type = other DNA
gaaccatttatcgtgtgcct

SEQ ID NO: 37049 - DNA, 20 bp, synthetic construct
  misc_feature 1..20: note = Description of Artificial Sequence: Synthetic oligonucleotide
  misc_feature 1..20: note = Target: FXN; (+) strand; PAM type: YTN; PAM sequence: TTT
  source 1..20: mol_type = other DNA
atcgtgtgccttaccatgct

SEQ ID NO: 37050 - DNA, 20 bp, synthetic construct
  misc_feature 1..20: note = Description of Artificial Sequence: Synthetic oligonucleotide
  misc_feature 1..20: note = Target: FXN; (+) strand; PAM type: YTN; PAM sequence: TTA
  source 1..20: mol_type = other DNA
tcgtgtgccttaccatgctt

SEQ ID NO: 37051 - DNA, 20 bp, synthetic construct
  misc_feature 1..20: note = Description of Artificial Sequence: Synthetic oligonucleotide
  misc_feature 1..20: note = Target: FXN; (+) strand; PAM type: YTN; PAM sequence: CTT
  source 1..20: mol_type = other DNA
accatgcttatattttactt

SEQ ID NO: 37052 - DNA, 20 bp, synthetic construct
  misc_feature 1..20: note = Description of Artificial Sequence: Synthetic oligonucleotide
  misc_feature 1..20: note = Target: FXN; (+) strand; PAM type: YTN; PAM sequence: TTA
  source 1..20: mol_type = other DNA
ccatgcttatattttacttg

SEQ ID NO: 37053 - DNA, 20 bp, synthetic construct
  misc_feature 1..20: note = Description of Artificial Sequence: Synthetic oligonucleotide
  misc_feature 1..20: note = Target: FXN; (+) strand; PAM type: YTN; PAM sequence: CTT
  source 1..20: mol_type = other DNA
atattttacttgatcttttg

SEQ ID NO: 37054 - DNA, 20 bp, synthetic construct
  misc_feature 1..20: note = Description of Artificial Sequence: Synthetic oligonucleotide
  misc_feature 1..20: note = Target: FXN; (+) strand; PAM type: YTN; PAM sequence: TTA
  source 1..20: mol_type = other DNA
tattttacttgatcttttgc

SEQ ID NO: 37055 - DNA, 20 bp, synthetic construct
  misc_feature 1..20: note = Description of Artificial Sequence: Synthetic oligonucleotide
  misc_feature 1..20: note = Target: FXN; (+) strand; PAM type: YTN; PAM sequence: TTT
  source 1..20: mol_type = other DNA
tacttgatcttttgcatacc

SEQ ID NO: 37056 - DNA, 20 bp, synthetic construct
  misc_feature 1..20: note = Description of Artificial Sequence: Synthetic oligonucleotide
  misc_feature 1..20: note = Target: FXN; (+) strand; PAM type: YTN; PAM sequence: TTT
  source 1..20: mol_type = other DNA
acttgatcttttgcatacct

SEQ ID NO: 37057 - DNA, 20 bp, synthetic construct
  misc_feature 1..20: note = Description of Artificial Sequence: Synthetic oligonucleotide
  misc_feature 1..20: note = Target: FXN; (+) strand; PAM type: YTN; PAM sequence: TTA
  source 1..20: mol_type = other DNA
cttgatcttttgcatacctt

SEQ ID NO: 37058 - DNA, 20 bp, synthetic construct
  misc_feature 1..20: note = Description of Artificial Sequence: Synthetic oligonucleotide
  misc_feature 1..20: note = Target: FXN; (+) strand; PAM type: YTN; PAM sequence: CTT
  source 1..20: mol_type = other DNA
gatcttttgcataccttcta

SEQ ID NO: 37059 - DNA, 20 bp, synthetic construct
  misc_feature 1..20: note = Description of Artificial Sequence: Synthetic oligonucleotide
  misc_feature 1..20: note = Target: FXN; (+) strand; PAM type: YTN; PAM sequence: TTG
  source 1..20: mol_type = other DNA
atcttttgcataccttctaa

SEQ ID NO: 37060 - DNA, 20 bp, synthetic construct
  misc_feature 1..20: note = Description of Artificial Sequence: Synthetic oligonucleotide
  misc_feature 1..20: note = Target: FXN; (+) strand; PAM type: YTN; PAM sequence: CTT
  source 1..20: mol_type = other DNA
ttgcataccttctaaaacta

SEQ ID NO: 37061 - DNA, 20 bp, synthetic construct
  misc_feature 1..20: note = Description of Artificial Sequence: Synthetic oligonucleotide
  misc_feature 1..20: note = Target: FXN; (+) strand; PAM type: YTN; PAM sequence: TTT
  source 1..20: mol_type = other DNA
tgcataccttctaaaactat

SEQ ID NO: 37062 - DNA, 20 bp, synthetic construct
  misc_feature 1..20: note = Description of Artificial Sequence: Synthetic oligonucleotide
  misc_feature 1..20: note = Target: FXN; (+) strand; PAM type: YTN; PAM sequence: TTT
  source 1..20: mol_type = other DNA
gcataccttctaaaactatt

SEQ ID NO: 37063 - DNA, 20 bp, synthetic construct
  misc_feature 1..20: note = Description of Artificial Sequence: Synthetic oligonucleotide
  misc_feature 1..20: note = Target: FXN; (+) strand; PAM type: YTN; PAM sequence: TTG
  source 1..20: mol_type = other DNA
cataccttctaaaactattt

SEQ ID NO: 37064 - DNA, 20 bp, synthetic construct
  misc_feature 1..20: note = Description of Artificial Sequence: Synthetic oligonucleotide
  misc_feature 1..20: note = Target: FXN; (+) strand; PAM type: YTN; PAM sequence: CTT
  source 1..20: mol_type = other DNA
ctaaaactattttagccaat

SEQ ID NO: 37065 - DNA, 20 bp, synthetic construct
  misc_feature 1..20: note = Description of Artificial Sequence: Synthetic oligonucleotide
  misc_feature 1..20: note = Target: FXN; (+) strand; PAM type: YTN; PAM sequence: TTC
  source 1..20: mol_type = other DNA
taaaactattttagccaatt

SEQ ID NO: 37066 - DNA, 20 bp, synthetic construct
  misc_feature 1..20: note = Description of Artificial Sequence: Synthetic oligonucleotide
  misc_feature 1..20: note = Target: FXN; (+) strand; PAM type: YTN; PAM sequence: CTA
  source 1..20: mol_type = other DNA
aaactattttagccaattta

SEQ ID NO: 37067 - DNA, 20 bp, synthetic construct
  misc_feature 1..20: note = Description of Artificial Sequence: Synthetic oligonucleotide
  misc_feature 1..20: note = Target: FXN; (+) strand; PAM type: YTN; PAM sequence: CTA
  source 1..20: mol_type = other DNA
ttttagccaatttaaaattt

SEQ ID NO: 37068 - DNA, 20 bp, synthetic construct
  misc_feature 1..20: note = Description of Artificial Sequence: Synthetic oligonucleotide
  misc_feature 1..20: note = Target: FXN; (+) strand; PAM type: YTN; PAM sequence: TTT
  source 1..20: mol_type = other DNA
tagccaatttaaaatttgac

SEQ ID NO: 37069 - DNA, 20 bp, synthetic construct
  misc_feature 1..20: note = Description of Artificial Sequence: Synthetic oligonucleotide
  misc_feature 1..20: note = Target: FXN; (+) strand; PAM type: YTN; PAM sequence: TTT
  source 1..20: mol_type = other DNA
agccaatttaaaatttgaca

SEQ ID NO: 37070 - DNA, 20 bp, synthetic construct
  misc_feature 1..20: note = Description of Artificial Sequence: Synthetic oligonucleotide
  misc_feature 1..20: note = Target: FXN; (+) strand; PAM type: YTN; PAM sequence: TTA
  source 1..20: mol_type = other DNA
gccaatttaaaatttgacag

SEQ ID NO: 37071 - DNA, 20 bp, synthetic construct
  misc_feature 1..20: note = Description of Artificial Sequence: Synthetic oligonucleotide
  misc_feature 1..20: note = Target: FXN; (+) strand; PAM type: YTN; PAM sequence: TTT
  source 1..20: mol_type = other DNA
aaaatttgacagtttgcatt

SEQ ID NO: 37072 - DNA, 20 bp, synthetic construct
  misc_feature 1..20: note = Description of Artificial Sequence: Synthetic oligonucleotide
  misc_feature 1..20: note = Target: FXN; (+) strand; PAM type: YTN; PAM sequence: TTA
  source 1..20: mol_type = other DNA
aaatttgacagtttgcatta

SEQ ID NO: 37073 - DNA, 20 bp, synthetic construct
  misc_feature 1..20: note = Description of Artificial Sequence: Synthetic oligonucleotide
  misc_feature 1..20: note = Target: FXN; (+) strand; PAM type: YTN; PAM sequence: TTT
  source 1..20: mol_type = other DNA
gacagtttgcattaaattat

SEQ ID NO: 37074 - DNA, 20 bp, synthetic construct
  misc_feature 1..20: note = Description of Artificial Sequence: Synthetic oligonucleotide
  misc_feature 1..20: note = Target: FXN; (+) strand; PAM type: YTN; PAM sequence: TTG
  source 1..20: mol_type = other DNA
acagtttgcattaaattata

SEQ ID NO: 37075 - DNA, 20 bp, synthetic construct
  misc_feature 1..20: note = Description of Artificial Sequence: Synthetic oligonucleotide
  misc_feature 1..20: note = Target: FXN; (+) strand; PAM type: YTN; PAM sequence: TTT
  source 1..20: mol_type = other DNA
gcattaaattataggtttac

SEQ ID NO: 37076 - DNA, 20 bp, synthetic construct
  misc_feature 1..20: note = Description of Artificial Sequence: Synthetic oligonucleotide
  misc_feature 1..20: note = Target: FXN; (+) strand; PAM type: YTN; PAM sequence: TTG
  source 1..20: mol_type = other DNA
cattaaattataggtttaca

SEQ ID NO: 37077 - DNA, 20 bp, synthetic construct
  misc_feature 1..20: note = Description of Artificial Sequence: Synthetic oligonucleotide
  misc_feature 1..20: note = Target: FXN; (+) strand; PAM type: YTN; PAM sequence: TTA
  source 1..20: mol_type = other DNA
aattataggtttacaatatg

SEQ ID NO: 37078 - DNA, 20 bp, synthetic construct
  misc_feature 1..20: note = Description of Artificial Sequence: Synthetic oligonucleotide
  misc_feature 1..20: note = Target: FXN; (+) strand; PAM type: YTN; PAM sequence: TTA
  source 1..20: mol_type = other DNA
taggtttacaatatgcttta

SEQ ID NO: 37079 - DNA, 20 bp, synthetic construct
  misc_feature 1..20: note = Description of Artificial Sequence: Synthetic oligonucleotide
  misc_feature 1..20: note = Target: FXN; (+) strand; PAM type: YTN; PAM sequence: TTT
  source 1..20: mol_type = other DNA
acaatatgctttatccagct

SEQ ID NO: 37080 - DNA, 20 bp, synthetic construct
  misc_feature 1..20: note = Description of Artificial Sequence: Synthetic oligonucleotide
  misc_feature 1..20: note = Target: FXN; (+) strand; PAM type: YTN; PAM sequence: TTA
  source 1..20: mol_type = other DNA
caatatgctttatccagcta

SEQ ID NO: 37081 - DNA, 20 bp, synthetic construct
  misc_feature 1..20: note = Description of Artificial Sequence: Synthetic oligonucleotide
  misc_feature 1..20: note = Target: FXN; (+) strand; PAM type: YTN; PAM sequence: CTT
  source 1..20: mol_type = other DNA
tatccagctatacctgcccc

SEQ ID NO: 37082 - DNA, 20 bp, synthetic construct
  misc_feature 1..20: note = Description of Artificial Sequence: Synthetic oligonucleotide
  misc_feature 1..20: note = Target: FXN; (+) strand; PAM type: YTN; PAM sequence: TTT
  source 1..20: mol_type = other DNA
atccagctatacctgcccca

SEQ ID NO: 37083 - DNA, 20 bp, synthetic construct
  misc_feature 1..20: note = Description of Artificial Sequence: Synthetic oligonucleotide
  misc_feature 1..20: note = Target: FXN; (+) strand; PAM type: YTN; PAM sequence: TTA
  source 1..20: mol_type = other DNA
tccagctatacctgccccaa

SEQ ID NO: 37084 - DNA, 20 bp, synthetic construct
  misc_feature 1..20: note = Description of Artificial Sequence: Synthetic oligonucleotide
  misc_feature 1..20: note = Target: FXN; (+) strand; PAM type: YTN; PAM sequence: CTA
  source 1..20: mol_type = other DNA
tacctgccccaaattctgac

SEQ ID NO: 37085 - DNA, 20 bp, synthetic construct
  misc_feature 1..20: note = Description of Artificial Sequence: Synthetic oligonucleotide
  misc_feature 1..20: note = Target: FXN; (+) strand; PAM type: YTN; PAM sequence: CTG
  source 1..20: mol_type = other DNA
ccccaaattctgacagatgc

SEQ ID NO: 37086 - DNA, 20 bp, synthetic construct
  misc_feature 1..20: note = Description of Artificial Sequence: Synthetic oligonucleotide
  misc_feature 1..20: note = Target: FXN; (+) strand; PAM type: YTN; PAM sequence: TTC
  source 1..20: mol_type = other DNA
tgacagatgcttttgccacc

SEQ ID NO: 37087 - DNA, 20 bp, synthetic construct
  misc_feature 1..20: note = Description of Artificial Sequence: Synthetic oligonucleotide
  misc_feature 1..20: note = Target: FXN; (+) strand; PAM type: YTN; PAM sequence: CTG
  source 1..20: mol_type = other DNA
acagatgcttttgccacctc

SEQ ID NO: 37088 - DNA, 20 bp, synthetic construct
  misc_feature 1..20: note = Description of Artificial Sequence: Synthetic oligonucleotide
  misc_feature 1..20: note = Target: FXN; (+) strand; PAM type: YTN; PAM sequence: CTT
  source 1..20: mol_type = other DNA
ttgccacctctaaaggaaga

SEQ ID NO: 37089 - DNA, 20 bp, synthetic construct
  misc_feature 1..20: note = Description of Artificial Sequence: Synthetic oligonucleotide
  misc_feature 1..20: note = Target: FXN; (+) strand; PAM type: YTN; PAM sequence: TTT
  source 1..20: mol_type = other DNA
tgccacctctaaaggaagac

SEQ ID NO: 37090 - DNA, 20 bp, synthetic construct
  misc_feature 1..20: note = Description of Artificial Sequence: Synthetic oligonucleotide
  misc_feature 1..20: note = Target: FXN; (+) strand; PAM type: YTN; PAM sequence: TTT
  source 1..20: mol_type = other DNA
gccacctctaaaggaagacc

SEQ ID NO: 37091 - DNA, 20 bp, synthetic construct
  misc_feature 1..20: note = Description of Artificial Sequence: Synthetic oligonucleotide
  misc_feature 1..20: note = Target: FXN; (+) strand; PAM type: YTN; PAM sequence: TTG
  source 1..20: mol_type = other DNA
ccacctctaaaggaagaccc

SEQ ID NO: 37092 - DNA, 20 bp, synthetic construct
  misc_feature 1..20: note = Description of Artificial Sequence: Synthetic oligonucleotide
  misc_feature 1..20: note = Target: FXN; (+) strand; PAM type: YTN; PAM sequence: CTC
  source 1..20: mol_type = other DNA
taaaggaagacccatgttca

SEQ ID NO: 37093 - DNA, 20 bp, synthetic construct
  misc_feature 1..20: note = Description of Artificial Sequence: Synthetic oligonucleotide
  misc_feature 1..20: note = Target: FXN; (+) strand; PAM type: YTN; PAM sequence: CTA
  source 1..20: mol_type = other DNA
aaggaagacccatgttcata

SEQ ID NO: 37094 - DNA, 20 bp, synthetic construct
  misc_feature 1..20: note = Description of Artificial Sequence: Synthetic oligonucleotide
  misc_feature 1..20: note = Target: FXN; (+) strand; PAM type: YTN; PAM sequence: TTC
  source 1..20: mol_type = other DNA
atagtgatggagtttgtgtg

SEQ ID NO: 37095 - DNA, 20 bp, synthetic construct
  misc_feature 1..20: note = Description of Artificial Sequence: Synthetic oligonucleotide
  misc_feature 1..20: note = Target: FXN; (+) strand; PAM type: YTN; PAM sequence: TTT
  source 1..20: mol_type = other DNA
gtgtggactaaccatgcaag

SEQ ID NO: 37096 - DNA, 20 bp, synthetic construct
  misc_feature 1..20: note = Description of Artificial Sequence: Synthetic oligonucleotide
  misc_feature 1..20: note = Target: FXN; (+) strand; PAM type: YTN; PAM sequence: TTG
  source 1..20: mol_type = other DNA
tgtggactaaccatgcaagg

SEQ ID NO: 37097 - DNA, 20 bp, synthetic construct
  misc_feature 1..20: note = Description of Artificial Sequence: Synthetic oligonucleotide
  misc_feature 1..20: note = Target: FXN; (+) strand; PAM type: YTN; PAM sequence: CTA
  source 1..20: mol_type = other DNA
accatgcaaggttgccaagg

SEQ ID NO: 37098 - DNA, 20 bp, synthetic construct
  misc_feature 1..20: note = Description of Artificial Sequence: Synthetic oligonucleotide
  misc_feature 1..20: note = Target: FXN; (+) strand; PAM type: YTN; PAM sequence: TTG
  source 1..20: mol_type = other DNA
ccaaggaaaaatcgctttac

SEQ ID NO: 37099 - DNA, 20 bp, synthetic construct
  misc_feature 1..20: note = Description of Artificial Sequence: Synthetic oligonucleotide
  misc_feature 1..20: note = Target: FXN; (+) strand; PAM type: YTN; PAM sequence: CTT
  source 1..20: mol_type = other DNA
tacgcttccaaggtacacac

SEQ ID NO: 37100 - DNA, 20 bp, synthetic construct
  misc_feature 1..20: note = Description of Artificial Sequence: Synthetic oligonucleotide
  misc_feature 1..20: note = Target: FXN; (+) strand; PAM type: YTN; PAM sequence: TTT
  source 1..20: mol_type = other DNA
acgcttccaaggtacacact

SEQ ID NO: 37101 - DNA, 20 bp, synthetic construct
  misc_feature 1..20: note = Description of Artificial Sequence: Synthetic oligonucleotide
  misc_feature 1..20: note = Target: FXN; (+) strand; PAM type: YTN; PAM sequence: TTA
  source 1..20: mol_type = other DNA
cgcttccaaggtacacacta

SEQ ID NO: 37102 - DNA, 20 bp, synthetic construct
  misc_feature 1..20: note = Description of Artificial Sequence: Synthetic oligonucleotide
  misc_feature 1..20: note = Target: FXN; (+) strand; PAM type: YTN; PAM sequence: CTT
  source 1..20: mol_type = other DNA
ccaaggtacacactaagatg

SEQ ID NO: 37103 - DNA, 20 bp, synthetic construct
  misc_feature 1..20: note = Description of Artificial Sequence: Synthetic oligonucleotide
  misc_feature 1..20: note = Target: FXN; (+) strand; PAM type: YTN; PAM sequence: TTC
  source 1..20: mol_type = other DNA
caaggtacacactaagatga

SEQ ID NO: 37104 - DNA, 20 bp, synthetic construct
  misc_feature 1..20: note = Description of Artificial Sequence: Synthetic oligonucleotide
  misc_feature 1..20: note = Target: FXN; (+) strand; PAM type: YTN; PAM sequence: CTA
  source 1..20: mol_type = other DNA
agatgaaagtaattttagtc

SEQ ID NO: 37105 - DNA, 20 bp, synthetic construct
  misc_feature 1..20: note = Description of Artificial Sequence: Synthetic oligonucleotide
  misc_feature 1..20: note = Target: FXN; (+) strand; PAM type: YTN; PAM sequence: TTT
  source 1..20: mol_type = other DNA
tagtccgtgtccagttggat

SEQ ID NO: 37106 - DNA, 20 bp, synthetic construct
  misc_feature 1..20: note = Description of Artificial Sequence: Synthetic oligonucleotide
  misc_feature 1..20: note = Target: FXN; (+) strand; PAM type: YTN; PAM sequence: TTT
  source 1..20: mol_type = other DNA
agtccgtgtccagttggatt

SEQ ID NO: 37107 - DNA, 20 bp, synthetic construct
  misc_feature 1..20: note = Description of Artificial Sequence: Synthetic oligonucleotide
  misc_feature 1..20: note = Target: FXN; (+) strand; PAM type: YTN; PAM sequence: TTA
  source 1..20: mol_type = other DNA
gtccgtgtccagttggattc

SEQ ID NO: 37108 - DNA, 20 bp, synthetic construct
  misc_feature 1..20: note = Description of Artificial Sequence: Synthetic oligonucleotide
  misc_feature 1..20: note = Target: FXN; (+) strand; PAM type: YTN; PAM sequence: TTG
  source 1..20: mol_type = other DNA
gattcttggcacatagttat

SEQ ID NO: 37109 - DNA, 20 bp, synthetic construct
  misc_feature 1..20: note = Description of Artificial Sequence: Synthetic oligonucleotide
  misc_feature 1..20: note = Target: FXN; (+) strand; PAM type: YTN; PAM sequence: TTC
  source 1..20: mol_type = other DNA
ttggcacatagttatcttct

SEQ ID NO: 37110 - DNA, 20 bp, synthetic construct
  misc_feature 1..20: note = Description of Artificial Sequence: Synthetic oligonucleotide
  misc_feature 1..20: note = Target: FXN; (+) strand; PAM type: YTN; PAM sequence: CTT
  source 1..20: mol_type = other DNA
ggcacatagttatcttctgc

SEQ ID NO: 37111 - DNA, 20 bp, synthetic construct
  misc_feature 1..20: note = Description of Artificial Sequence: Synthetic oligonucleotide
  misc_feature 1..20: note = Target: FXN; (+) strand; PAM type: YTN; PAM sequence: TTG
  source 1..20: mol_type = other DNA
gcacatagttatcttctgct

SEQ ID NO: 37112 - DNA, 20 bp, synthetic construct
  misc_feature 1..20: note = Description of Artificial Sequence: Synthetic oligonucleotide
  misc_feature 1..20: note = Target: FXN; (+) strand; PAM type: YTN; PAM sequence: TTA
  source 1..20: mol_type = other DNA
tcttctgctagaacaaacta

SEQ ID NO: 37113 - DNA, 20 bp, synthetic construct
  misc_feature 1..20: note = Description of Artificial Sequence: Synthetic oligonucleotide
  misc_feature 1..20: note = Target: FXN; (+) strand; PAM type: YTN; PAM sequence: CTT
  source 1..20: mol_type = other DNA
ctgctagaacaaactaaaac

SEQ ID NO: 37114 - DNA, 20 bp, synthetic construct
  misc_feature 1..20: note = Description of Artificial Sequence: Synthetic oligonucleotide
  misc_feature 1..20: note = Target: FXN; (+) strand; PAM type: YTN; PAM sequence: TTC
  source 1..20: mol_type = other DNA
tgctagaacaaactaaaaca

SEQ ID NO: 37115 - DNA, 20 bp, synthetic construct
  misc_feature 1..20: note = Description of Artificial Sequence: Synthetic oligonucleotide
  misc_feature 1..20: note = Target: FXN; (+) strand; PAM type: YTN; PAM sequence: CTG
  source 1..20: mol_type = other DNA
ctagaacaaactaaaacagc

SEQ ID NO: 37116 - DNA, 20 bp, synthetic construct
  misc_feature 1..20: note = Description of Artificial Sequence: Synthetic oligonucleotide
  misc_feature 1..20: note = Target: FXN; (+) strand; PAM type: YTN; PAM sequence: CTA
  source 1..20: mol_type = other DNA
gaacaaactaaaacagctac

SEQ ID NO: 37117 - DNA, 20 bp, synthetic construct
  misc_feature 1..20: note = Description of Artificial Sequence: Synthetic oligonucleotide
  misc_feature 1..20: note = Target: FXN; (+) strand; PAM type: YTN; PAM sequence: CTA
  source 1..20: mol_type = other DNA
aaacagctacatgccagcaa

SEQ ID NO: 37118 - DNA, 20 bp, synthetic construct
  misc_feature 1..20: note = Description of Artificial Sequence: Synthetic oligonucleotide
  misc_feature 1..20: note = Target: FXN; (+) strand; PAM type: YTN; PAM sequence: CTA
  source 1..20: mol_type = other DNA
catgccagcaagggagaaag

SEQ ID NO: 37119 - DNA, 20 bp, synthetic construct
  misc_feature 1..20: note = Description of Artificial Sequence: Synthetic oligonucleotide
  misc_feature 1..20: note = Target: FXN; (+) strand; PAM type: YTN; PAM sequence: TTT
  source 1..20: mol_type = other DNA
tgaaatttcatgtaaattta

SEQ ID NO: 37120 - DNA, 20 bp, synthetic construct
  misc_feature 1..20: note = Description of Artificial Sequence: Synthetic oligonucleotide
  misc_feature 1..20: note = Target: FXN; (+) strand; PAM type: YTN; PAM sequence: TTT
  source 1..20: mol_type = other DNA
gaaatttcatgtaaatttat

SEQ ID NO: 37121 - DNA, 20 bp, synthetic construct
  misc_feature 1..20: note = Description of Artificial Sequence: Synthetic oligonucleotide
  misc_feature 1..20: note = Target: FXN; (+) strand; PAM type: YTN; PAM sequence: TTG
  source 1..20: mol_type = other DNA
aaatttcatgtaaatttatg

SEQ ID NO: 37122 - DNA, 20 bp, synthetic construct
  misc_feature 1..20: note = Description of Artificial Sequence: Synthetic oligonucleotide
  misc_feature 1..20: note = Target: FXN; (+) strand; PAM type: YTN; PAM sequence: TTT
  source 1..20: mol_type = other DNA
catgtaaatttatgctgttc

SEQ ID NO: 37123 - DNA, 20 bp, synthetic construct
  misc_feature 1..20: note = Description of Artificial Sequence: Synthetic oligonucleotide
  misc_feature 1..20: note = Target: FXN; (+) strand; PAM type: YTN; PAM sequence: TTC
  source 1..20: mol_type = other DNA
atgtaaatttatgctgttca

SEQ ID NO: 37124 - DNA, 20 bp, synthetic construct
  misc_feature 1..20: note = Description of Artificial Sequence: Synthetic oligonucleotide
  misc_feature 1..20: note = Target: FXN; (+) strand; PAM type: YTN; PAM sequence: TTT
  source 1..20: mol_type = other DNA
atgctgttcaaaacgacgag

SEQ ID NO: 37125 - DNA, 20 bp, synthetic construct
  misc_feature 1..20: note = Description of Artificial Sequence: Synthetic oligonucleotide
  misc_feature 1..20: note = Target: FXN; (+) strand; PAM type: YTN; PAM sequence: TTA
  source 1..20: mol_type = other DNA
tgctgttcaaaacgacgagt

SEQ ID NO: 37126 - DNA, 20 bp, synthetic construct
  misc_feature 1..20: note = Description of Artificial Sequence: Synthetic oligonucleotide
  misc_feature 1..20: note = Target: FXN; (+) strand; PAM type: YTN; PAM sequence: CTG
  source 1..20: mol_type = other DNA
ttcaaaacgacgagttcatg

SEQ ID NO: 37127 - DNA, 20 bp, synthetic construct
  misc_feature 1..20: note = Description of Artificial Sequence: Synthetic oligonucleotide
  misc_feature 1..20: note = Target: FXN; (+) strand; PAM type: YTN; PAM sequence: TTC
  source 1..20: mol_type = other DNA
aaaacgacgagttcatgact

SEQ ID NO: 37128 - DNA, 20 bp, synthetic construct
  misc_feature 1..20: note = Description of Artificial Sequence: Synthetic oligonucleotide
  misc_feature 1..20: note = Target: FXN; (+) strand; PAM type: YTN; PAM sequence: TTC
  source 1..20: mol_type = other DNA
atgactttgtgtatagagta

SEQ ID NO: 37129 - DNA, 20 bp, synthetic construct
  misc_feature 1..20: note = Description of Artificial Sequence: Synthetic oligonucleotide
  misc_feature 1..20: note = Target: FXN; (+) strand; PAM type: YTN; PAM sequence: CTT
  source 1..20: mol_type = other DNA
tgtgtatagagtaagaaatg

SEQ ID NO: 37130 - DNA, 20 bp, synthetic construct
  misc_feature 1..20: note = Description of Artificial Sequence: Synthetic oligonucleotide
  misc_feature 1..20: note = Target: FXN; (+) strand; PAM type: YTN; PAM sequence: TTT
  source 1..20: mol_type = other DNA
gtgtatagagtaagaaatgc

SEQ ID NO: 37131 - DNA, 20 bp, synthetic construct
  misc_feature 1..20: note = Description of Artificial Sequence: Synthetic oligonucleotide
  misc_feature 1..20: note = Target: FXN; (+) strand; PAM type: YTN; PAM sequence: TTG
  source 1..20: mol_type = other DNA
tgtatagagtaagaaatgcc

SEQ ID NO: 37132 - DNA, 20 bp, synthetic construct
  misc_feature 1..20: note = Description of Artificial Sequence: Synthetic oligonucleotide
  misc_feature 1..20: note = Target: FXN; (+) strand; PAM type: YTN; PAM sequence: CTT
  source 1..20: mol_type = other DNA
ttcttttttgagacagagtc

SEQ ID NO: 37133 - DNA, 20 bp, synthetic construct
  misc_feature 1..20: note = Description of Artificial Sequence: Synthetic oligonucleotide
  misc_feature 1..20: note = Target: FXN; (+) strand; PAM type: YTN; PAM sequence: TTT
  source 1..20: mol_type = other DNA
tcttttttgagacagagtct

SEQ ID NO: 37134 - DNA, 20 bp, synthetic construct
  misc_feature 1..20: note = Description of Artificial Sequence: Synthetic oligonucleotide
  misc_feature 1..20: note = Target: FXN; (+) strand; PAM type: YTN; PAM sequence: TTT
  source 1..20: mol_type = other DNA
cttttttgagacagagtctt

SEQ ID NO: 37135 - DNA, 20 bp, synthetic construct
  misc_feature 1..20: note = Description of Artificial Sequence: Synthetic oligonucleotide
  misc_feature 1..20: note = Target: FXN; (+) strand; PAM type: YTN; PAM sequence: TTC
  source 1..20: mol_type = other DNA
ttttttgagacagagtcttg

SEQ ID NO: 37136 - DNA, 20 bp, synthetic construct
  misc_feature 1..20: note = Description of Artificial Sequence: Synthetic oligonucleotide
  misc_feature 1..20: note = Target: FXN; (+) strand; PAM type: YTN; PAM sequence: CTT
  source 1..20: mol_type = other DNA
ttttgagacagagtcttgct

SEQ ID NO: 37137 - DNA, 20 bp, synthetic construct
  misc_feature 1..20: note = Description of Artificial Sequence: Synthetic oligonucleotide
  misc_feature 1..20: note = Target: FXN; (+) strand; PAM type: YTN; PAM sequence: TTT
  source 1..20: mol_type = other DNA
tttgagacagagtcttgctc

SEQ ID NO: 37138 - DNA, 20 bp, synthetic construct
  misc_feature 1..20: note = Description of Artificial Sequence: Synthetic oligonucleotide
  misc_feature 1..20: note = Target: FXN; (+) strand; PAM type: YTN; PAM sequence: TTT
  source 1..20: mol_type = other DNA
ttgagacagagtcttgctct

SEQ ID NO: 37139 - DNA, 20 bp, synthetic construct
  misc_feature 1..20: note = Description of Artificial Sequence: Synthetic oligonucleotide
  misc_feature 1..20: note = Target: FXN; (+) strand; PAM type: YTN; PAM sequence: TTT
  source 1..20: mol_type = other DNA
tgagacagagtcttgctctg

SEQ ID NO: 37140 - DNA, 20 bp, synthetic construct
  misc_feature 1..20: note = Description of Artificial Sequence: Synthetic oligonucleotide
  misc_feature 1..20: note = Target: FXN; (+) strand; PAM type: YTN; PAM sequence: TTT
  source 1..20: mol_type = other DNA
gagacagagtcttgctctgt

SEQ ID NO: 37141 - DNA, 20 bp, synthetic construct
  misc_feature 1..20: note = Description of Artificial Sequence: Synthetic oligonucleotide
  misc_feature 1..20: note = Target: FXN; (+) strand; PAM type: YTN; PAM sequence: TTG
  source 1..20: mol_type = other DNA
agacagagtcttgctctgtc

SEQ ID NO: 37142 - DNA, 20 bp, synthetic construct
  misc_feature 1..20: note = Description of Artificial Sequence: Synthetic oligonucleotide
  misc_feature 1..20: note = Target: FXN; (+) strand; PAM type: YTN; PAM sequence: CTT
  source 1..20: mol_type = other DNA
gctctgtcacccaggctgga

SEQ ID NO: 37143 - DNA, 20 bp, synthetic construct
  misc_feature 1..20: note = Description of Artificial Sequence: Synthetic oligonucleotide
  misc_feature 1..20: note = Target: FXN; (+) strand; PAM type: YTN; PAM sequence: TTG
  source 1..20: mol_type = other DNA
ctctgtcacccaggctggag

SEQ ID NO: 37144 - DNA, 20 bp, synthetic construct
  misc_feature 1..20: note = Description of Artificial Sequence: Synthetic oligonucleotide
  misc_feature 1..20: note = Target: FXN; (+) strand; PAM type: YTN; PAM sequence: CTC
  source 1..20: mol_type = other DNA
tgtcacccaggctggagtgc

SEQ ID NO: 37145 - DNA, 20 bp, synthetic construct
  misc_feature 1..20: note = Description of Artificial Sequence: Synthetic oligonucleotide
  misc_feature 1..20: note = Target: FXN; (+) strand; PAM type: YTN; PAM sequence: CTG
  source 1..20: mol_type = other DNA
tcacccaggctggagtgcag

SEQ ID NO: 37146 - DNA, 20 bp, synthetic construct
  misc_feature 1..20: note = Description of Artificial Sequence: Synthetic oligonucleotide
  misc_feature 1..20: note = Target: FXN; (+) strand; PAM type: YTN; PAM sequence: CTG
  source 1..20: mol_type = other DNA
gagtgcagtggcacgatctg

SEQ ID NO: 37147 - DNA, 20 bp, synthetic construct
  misc_feature 1..20: note = Description of Artificial Sequence: Synthetic oligonucleotide
  misc_feature 1..20: note = Target: FXN; (+) strand; PAM type: YTN; PAM sequence: CTG
  source 1..20: mol_type = other DNA
ggctcactacaacctccgcc

SEQ ID NO: 37148 - DNA, 20 bp, synthetic construct
  misc_feature 1..20: note = Description of Artificial Sequence: Synthetic oligonucleotide
  misc_feature 1..20: note = Target: FXN; (+) strand; PAM type: YTN; PAM sequence: CTC
  source 1..20: mol_type = other DNA
actacaacctccgcctcctg

SEQ ID NO: 37149 - DNA, 20 bp, synthetic construct
  misc_feature 1..20: note = Description of Artificial Sequence: Synthetic oligonucleotide
  misc_feature 1..20: note = Target: FXN; (+) strand; PAM type: YTN; PAM sequence: CTA
  source 1..20: mol_type = other DNA
caacctccgcctcctgggtt

SEQ ID NO: 37150 - DNA, 20 bp, synthetic construct
  misc_feature 1..20: note = Description of Artificial Sequence: Synthetic oligonucleotide
  misc_feature 1..20: note = Target: FXN; (+) strand; PAM type: YTN; PAM sequence: CTC
  source 1..20: mol_type = other DNA
cgcctcctgggttcaagcaa

SEQ ID NO: 37151 - DNA, 20 bp, synthetic construct
  misc_feature 1..20: note = Description of Artificial Sequence: Synthetic oligonucleotide
  misc_feature 1..20: note = Target: FXN; (+) strand; PAM type: YTN; PAM sequence: CTC
  source 1..20: mol_type = other DNA
ctgggttcaagcaattctct

SEQ ID NO: 37152 - DNA, 20 bp, synthetic construct
  misc_feature 1..20: note = Description of Artificial Sequence: Synthetic oligonucleotide
  misc_feature 1..20: note = Target: FXN; (+) strand; PAM type: YTN; PAM sequence: CTG
  source 1..20: mol_type = other DNA
ggttcaagcaattctctgcc

SEQ ID NO: 37153 - DNA, 20 bp, synthetic construct
  misc_feature 1..20: note = Description of Artificial Sequence: Synthetic oligonucleotide
  misc_feature 1..20: note = Target: FXN; (+) strand; PAM type: YTN; PAM sequence: TTC
  source 1..20: mol_type = other DNA
aagcaattctctgcctcagc

SEQ ID NO: 37154 - DNA, 20 bp, synthetic construct
  misc_feature 1..20: note = Description of Artificial Sequence: Synthetic oligonucleotide
  misc_feature 1..20: note = Target: FXN; (+) strand; PAM type: YTN; PAM sequence: TTC
  source 1..20: mol_type = other DNA
tctgcctcagcctcccgagt

SEQ ID NO: 37155 - DNA, 20 bp, synthetic construct
  misc_feature 1..20: note = Description of Artificial Sequence: Synthetic oligonucleotide
  misc_feature 1..20: note = Target: FXN; (+) strand; PAM type: YTN; PAM sequence: CTC
  source 1..20: mol_type = other DNA
tgcctcagcctcccgagtag

SEQ ID NO: 37156 - DNA, 20 bp, synthetic construct
  misc_feature 1..20: note = Description of Artificial Sequence: Synthetic oligonucleotide
  misc_feature 1..20: note = Target: FXN; (+) strand; PAM type: YTN; PAM sequence: CTG
  source 1..20: mol_type = other DNA
cctcagcctcccgagtagct

SEQ ID NO: 37157 - DNA, 20 bp, synthetic construct
  misc_feature 1..20: note = Description of Artificial Sequence: Synthetic oligonucleotide
  misc_feature 1..20: note = Target: FXN; (+) strand; PAM type: YTN; PAM sequence: CTC
  source 1..20: mol_type = other DNA
agcctcccgagtagctggga

SEQ ID NO: 37158 - DNA, 20 bp, synthetic construct
  misc_feature 1..20: note = Description of Artificial Sequence: Synthetic oligonucleotide
  misc_feature 1..20: note = Target: FXN; (+) strand; PAM type: YTN; PAM sequence: CTC
  source 1..20: mol_type = other DNA
ccgagtagctgggattacag

SEQ ID NO: 37159 - DNA, 20 bp, synthetic construct
  misc_feature 1..20: note = Description of Artificial Sequence: Synthetic oligonucleotide
  misc_feature 1..20: note = Target: FXN; (+) strand; PAM type: YTN; PAM sequence: CTG
  source 1..20: mol_type = other DNA
ggattacaggtgcctgccac

SEQ ID NO: 37160 - DNA, 20 bp, synthetic construct
  misc_feature 1..20: note = Description of Artificial Sequence: Synthetic oligonucleotide
  misc_feature 1..20: note = Target: FXN; (+) strand; PAM type: YTN; PAM sequence: TTA
  source 1..20: mol_type = other DNA
caggtgcctgccaccacacc

SEQ ID NO: 37161 - DNA, 20 bp, synthetic construct
  misc_feature 1..20: note = Description of Artificial Sequence: Synthetic oligonucleotide
  misc_feature 1..20: note = Target: FXN; (+) strand; PAM type: YTN; PAM sequence: CTG
  source 1..20: mol_type = other DNA
ccaccacacccggctaattt

SEQ ID NO: 37162 - DNA, 20 bp, synthetic construct
  misc_feature 1..20: note = Description of Artificial Sequence: Synthetic oligonucleotide
  misc_feature 1..20: note = Target: FXN; (+) strand; PAM type: YTN; PAM sequence: CTA
  source 1..20: mol_type = other DNA
atttttgtatttttagtaga

SEQ ID NO: 37163 - DNA, 20 bp, synthetic construct
  misc_feature 1..20: note = Description of Artificial Sequence: Synthetic oligonucleotide
  misc_feature 1..20: note = Target: FXN; (+) strand; PAM type: YTN; PAM sequence: TTT
  source 1..20: mol_type = other DNA
ttgtatttttagtagagacg

SEQ ID NO: 37164 - DNA, 20 bp, synthetic construct
  misc_feature 1..20: note = Description of Artificial Sequence: Synthetic oligonucleotide
  misc_feature 1..20: note = Target: FXN; (+) strand; PAM type: YTN; PAM sequence: TTT
  source 1..20: mol_type = other DNA
tgtatttttagtagagacgg

SEQ ID NO: 37165 - DNA, 20 bp, synthetic construct
  misc_feature 1..20: note = Description of Artificial Sequence: Synthetic oligonucleotide
  misc_feature 1..20: note = Target: FXN; (+) strand; PAM type: YTN; PAM sequence: TTT
  source 1..20: mol_type = other DNA
gtatttttagtagagacggg

SEQ ID NO: 37166 - DNA, 20 bp, synthetic construct
  misc_feature 1..20: note = Description of Artificial Sequence: Synthetic oligonucleotide
  misc_feature 1..20: note = Target: FXN; (+) strand; PAM type: YTN; PAM sequence: TTG
  source 1..20: mol_type = other DNA
tatttttagtagagacgggg

SEQ ID NO: 37167 - DNA, 20 bp, synthetic construct
  misc_feature 1..20: note = Description of Artificial Sequence: Synthetic oligonucleotide
  misc_feature 1..20: note = Target: FXN; (+) strand; PAM type: YTN; PAM sequence: TTT
  source 1..20: mol_type = other DNA
ttagtagagacggggtttca

SEQ ID NO: 37168 - DNA, 20 bp, synthetic construct
  misc_feature 1..20: note = Description of Artificial Sequence: Synthetic oligonucleotide
  misc_feature 1..20: note = Target: FXN; (+) strand; PAM type: YTN; PAM sequence: TTT
  source 1..20: mol_type = other DNA
tagtagagacggggtttcac

SEQ ID NO: 37169 - DNA, 20 bp, synthetic construct
  misc_feature 1..20: note = Description of Artificial Sequence: Synthetic oligonucleotide
  misc_feature 1..20: note = Target: FXN; (+) strand; PAM type: YTN; PAM sequence: TTT
  source 1..20: mol_type = other DNA
agtagagacggggtttcacc

SEQ ID NO: 37170 - DNA, 20 bp, synthetic construct
  misc_feature 1..20: note = Description of Artificial Sequence: Synthetic oligonucleotide
  misc_feature 1..20: note = Target: FXN; (+) strand; PAM type: YTN; PAM sequence: TTA
  source 1..20: mol_type = other DNA
gtagagacggggtttcacca

SEQ ID NO: 37171 - DNA, 20 bp, synthetic construct
  misc_feature 1..20: note = Description of Artificial Sequence: Synthetic oligonucleotide
  misc_feature 1..20: note = Target: FXN; (+) strand; PAM type: YTN; PAM sequence: TTT
  source 1..20: mol_type = other DNA
caccatcatggccaggctgg

SEQ ID NO: 37172 - DNA, 20 bp, synthetic construct
  misc_feature 1..20: note = Description of Artificial Sequence: Synthetic oligonucleotide
  misc_feature 1..20: note = Target: FXN; (+) strand; PAM type: YTN; PAM sequence: TTC
  source 1..20: mol_type = other DNA
accatcatggccaggctggt

SEQ ID NO: 37173 - DNA, 20 bp, synthetic construct
  misc_feature 1..20: note = Description of Artificial Sequence: Synthetic oligonucleotide
  misc_feature 1..20: note = Target: FXN; (+) strand; PAM type: YTN; PAM sequence: CTG
  source 1..20: mol_type = other DNA
gtcttgaactcctgacctag

SEQ ID NO: 37174 - DNA, 20 bp, synthetic construct
  misc_feature 1..20: note = Description of Artificial Sequence: Synthetic oligonucleotide
  misc_feature 1..20: note = Target: FXN; (+) strand; PAM type: YTN; PAM sequence: CTT
  source 1..20: mol_type = other DNA
gaactcctgacctagtaatc

SEQ ID NO: 37175 - DNA, 20 bp, synthetic construct
  misc_feature 1..20: note = Description of Artificial Sequence: Synthetic oligonucleotide
  misc_feature 1..20: note = Target: FXN; (+) strand; PAM type: YTN; PAM sequence: TTG
  source 1..20: mol_type = other DNA
aactcctgacctagtaatcc

SEQ ID NO: 37176 - DNA, 20 bp, synthetic construct
  misc_feature 1..20: note = Description of Artificial Sequence: Synthetic oligonucleotide
  misc_feature 1..20: note = Target: FXN; (+) strand; PAM type: YTN; PAM sequence: CTC
  source 1..20: mol_type = other DNA
ctgacctagtaatccacctg

SEQ ID NO: 37177 - DNA, 20 bp, synthetic construct
  misc_feature 1..20: note = Description of Artificial Sequence: Synthetic oligonucleotide
  misc_feature 1..20: note = Target: FXN; (+) strand; PAM type: YTN; PAM sequence: CTG
  source 1..20: mol_type = other DNA
acctagtaatccacctgcct

SEQ ID NO: 37178 - DNA, 20 bp, synthetic construct
  misc_feature 1..20: note = Description of Artificial Sequence: Synthetic oligonucleotide
  misc_feature 1..20: note = Target: FXN; (+) strand; PAM type: YTN; PAM sequence: CTA
  source 1..20: mol_type = other DNA
gtaatccacctgcctccgcc

SEQ ID NO: 37179 - DNA, 20 bp, synthetic construct
  misc_feature 1..20: note = Description of Artificial Sequence: Synthetic oligonucleotide
  misc_feature 1..20: note = Target: FXN; (+) strand; PAM type: YTN; PAM sequence: CTG
  source 1..20: mol_type = other DNA
cctccgcctcccaaagtgct

SEQ ID NO: 37180 - DNA, 20 bp, synthetic construct
  misc_feature 1..20: note = Description of Artificial Sequence: Synthetic oligonucleotide
  misc_feature 1..20: note = Target: FXN; (+) strand; PAM type: YTN; PAM sequence: CTC
  source 1..20: mol_type = other DNA
cgcctcccaaagtgctggga

SEQ ID NO: 37181 - DNA, 20 bp, synthetic construct
  misc_feature 1..20: note = Description of Artificial Sequence: Synthetic oligonucleotide
  misc_feature 1..20: note = Target: FXN; (+) strand; PAM type: YTN; PAM sequence: CTC
  source 1..20: mol_type = other DNA
ccaaagtgctgggattacag

SEQ ID NO: 37182 - DNA, 20 bp, synthetic construct
  misc_feature 1..20: note = Description of Artificial Sequence: Synthetic oligonucleotide
  misc_feature 1..20: note = Target: FXN; (+) strand; PAM type: YTN; PAM sequence: CTG
  source 1..20: mol_type = other DNA
ggattacaggcgtgagccac

SEQ ID NO: 37183 - DNA, 20 bp, synthetic construct
  misc_feature 1..20: note = Description of Artificial Sequence: Synthetic oligonucleotide
  misc_feature 1..20: note = Target: FXN; (+) strand; PAM type: YTN; PAM sequence: TTA
  source 1..20: mol_type = other DNA
caggcgtgagccactgcacc

SEQ ID NO: 37184 - DNA, 20 bp, synthetic construct
  misc_feature 1..20: note = Description of Artificial Sequence: Synthetic oligonucleotide
  misc_feature 1..20: note = Target: FXN; (+) strand; PAM type: YTN; PAM sequence: CTG
  source 1..20: mol_type = other DNA
cacccagccagaaatgcctt

SEQ ID NO: 37185 - DNA, 20 bp, synthetic construct
  misc_feature 1..20: note = Description of Artificial Sequence: Synthetic oligonucleotide
  misc_feature 1..20: note = Target: FXN; (+) strand; PAM type: YTN; PAM sequence: CTT
  source 1..20: mol_type = other DNA
ctaatctttggtttatctta

SEQ ID NO: 37186 - DNA, 20 bp, synthetic construct
  misc_feature 1..20: note = Description of Artificial Sequence: Synthetic oligonucleotide
  misc_feature 1..20: note = Target: FXN; (+) strand; PAM type: YTN; PAM sequence: TTC
  source 1..20: mol_type = other DNA
taatctttggtttatcttaa

SEQ ID NO: 37187 - DNA, 20 bp, synthetic construct
  misc_feature 1..20: note = Description of Artificial Sequence: Synthetic oligonucleotide
  misc_feature 1..20: note = Target: FXN; (+) strand; PAM type: YTN; PAM sequence: CTA
  source 1..20: mol_type = other DNA
atctttggtttatcttaatt

SEQ ID NO: 37188 - DNA, 20 bp, synthetic construct
  misc_feature 1..20: note = Description of Artificial Sequence: Synthetic oligonucleotide
  misc_feature 1..20: note = Target: FXN; (+) strand; PAM type: YTN; PAM sequence: CTT
  source 1..20: mol_type = other DNA
tggtttatcttaattagcca

SEQ ID NO: 37189 - DNA, 20 bp, synthetic construct
  misc_feature 1..20: note = Description of Artificial Sequence: Synthetic oligonucleotide
  misc_feature 1..20: note = Target: FXN; (+) strand; PAM type: YTN; PAM sequence: TTT
  source 1..20: mol_type = other DNA
ggtttatcttaattagccag

SEQ ID NO: 37190 - DNA, 20 bp, synthetic construct
  misc_feature 1..20: note = Description of Artificial Sequence: Synthetic oligonucleotide
  misc_feature 1..20: note = Target: FXN; (+) strand; PAM type: YTN; PAM sequence: TTG
  source 1..20: mol_type = other DNA
gtttatcttaattagccagg

SEQ ID NO: 37191 - DNA, 20 bp, synthetic construct
  misc_feature 1..20: note = Description of Artificial Sequence: Synthetic oligonucleotide
  misc_feature 1..20: note = Target: FXN; (+) strand; PAM type: YTN; PAM sequence: TTT
  source 1..20: mol_type = other DNA
atcttaattagccaggacac

SEQ ID NO: 37192 - DNA, 20 bp, synthetic construct
  misc_feature 1..20: note = Description of Artificial Sequence: Synthetic oligonucleotide
  misc_feature 1..20: note = Target: FXN; (+) strand; PAM type: YTN; PAM sequence: TTA
  source 1..20: mol_type = other DNA
tcttaattagccaggacact

SEQ ID NO: 37193 - DNA, 20 bp, synthetic construct
  misc_feature 1..20: note = Description of Artificial Sequence: Synthetic oligonucleotide
  misc_feature 1..20: note = Target: FXN; (+) strand; PAM type: YTN; PAM sequence: CTT
  source 1..20: mol_type = other DNA
aattagccaggacacttgga

SEQ ID NO: 37194 - DNA, 20 bp, synthetic construct
  misc_feature 1..20: note = Description of Artificial Sequence: Synthetic oligonucleotide
  misc_feature 1..20: note = Target: FXN; (+) strand; PAM type: YTN; PAM sequence: TTA
  source 1..20: mol_type = other DNA
attagccaggacacttggag

SEQ ID NO: 37195 - DNA, 20 bp, synthetic construct
  misc_feature 1..20: note = Description of Artificial Sequence: Synthetic oligonucleotide
  misc_feature 1..20: note = Target: FXN; (+) strand; PAM type: YTN; PAM sequence: TTA
  source 1..20: mol_type = other DNA
gccaggacacttggagtgca

SEQ ID NO: 37196 - DNA, 20 bp, synthetic construct
  misc_feature 1..20: note = Description of Artificial Sequence: Synthetic oligonucleotide
  misc_feature 1..20: note = Target: FXN; (+) strand; PAM type: YTN; PAM sequence: CTT
  source 1..20: mol_type = other DNA
ggagtgcatcccgaagtacc

SEQ ID NO: 37197 - DNA, 20 bp, synthetic construct
  misc_feature 1..20: note = Description of Artificial Sequence: Synthetic oligonucleotide
  misc_feature 1..20: note = Target: FXN; (+) strand; PAM type: YTN; PAM sequence: TTG
  source 1..20: mol_type = other DNA
gagtgcatcccgaagtacct

SEQ ID NO: 37198 - DNA, 20 bp, synthetic construct
  misc_feature 1..20: note = Description of Artificial Sequence: Synthetic oligonucleotide
  misc_feature 1..20: note = Target: FXN; (+) strand; PAM type: YTN; PAM sequence: CTG
  source 1..20: mol_type = other DNA
atcagtggcccctttggaat

SEQ ID NO: 37199 - DNA, 20 bp, synthetic construct
  misc_feature 1..20: note = Description of Artificial Sequence: Synthetic oligonucleotide
  misc_feature 1..20: note = Target: FXN; (+) strand; PAM type: YTN; PAM sequence: CTT
  source 1..20: mol_type = other DNA
tggaatgtgtaaaactcagc

SEQ ID NO: 37200 - DNA, 20 bp, synthetic construct
  misc_feature 1..20: note = Description of Artificial Sequence: Synthetic oligonucleotide
  misc_feature 1..20: note = Target: FXN; (+) strand; PAM type: YTN; PAM sequence: TTT
  source 1..20: mol_type = other DNA
ggaatgtgtaaaactcagct

SEQ ID NO: 37201 - DNA, 20 bp, synthetic construct
  misc_feature 1..20: note = Description of Artificial Sequence: Synthetic oligonucleotide
  misc_feature 1..20: note = Target: FXN; (+) strand; PAM type: YTN; PAM sequence: TTG
  source 1..20: mol_type = other DNA
gaatgtgtaaaactcagctc

SEQ ID NO: 37202 - DNA, 20 bp, synthetic construct
  misc_feature 1..20: note = Description of Artificial Sequence: Synthetic oligonucleotide
  misc_feature 1..20: note = Target: FXN; (+) strand; PAM type: YTN; PAM sequence: CTC
  source 1..20: mol_type = other DNA
agctcacttatatccctgca

SEQ ID NO: 37203 - DNA, 20 bp, synthetic construct
  misc_feature 1..20: note = Description of Artificial Sequence: Synthetic oligonucleotide
  misc_feature 1..20: note = Target: FXN; (+) strand; PAM type: YTN; PAM sequence: CTC
  source 1..20: mol_type = other DNA
acttatatccctgcatccgc

SEQ ID NO: 37204 - DNA, 20 bp, synthetic construct
  misc_feature 1..20: note = Description of Artificial Sequence: Synthetic oligonucleotide
  misc_feature 1..20: note = Target: FXN; (+) strand; PAM type: YTN; PAM sequence: CTT
  source 1..20: mol_type = other DNA
atatccctgcatccgctaca

SEQ ID NO: 37205 - DNA, 20 bp, synthetic construct
  misc_feature 1..20: note = Description of Artificial Sequence: Synthetic oligonucleotide
  misc_feature 1..20: note = Target: FXN; (+) strand; PAM type: YTN; PAM sequence: TTA
  source 1..20: mol_type = other DNA
tatccctgcatccgctacag

SEQ ID NO: 37206 - DNA, 20 bp, synthetic construct
  misc_feature 1..20: note = Description of Artificial Sequence: Synthetic oligonucleotide
  misc_feature 1..20: note = Target: FXN; (+) strand; PAM type: YTN; PAM sequence: CTG
  source 1..20: mol_type = other DNA
catccgctacagagacagaa

SEQ ID NO: 37207 - DNA, 20 bp, synthetic construct
  misc_feature 1..20: note = Description of Artificial Sequence: Synthetic oligonucleotide
  misc_feature 1..20: note = Target: FXN; (+) strand; PAM type: YTN; PAM sequence: CTA
  source 1..20: mol_type = other DNA
cagagacagaatccaagctc

SEQ ID NO: 37208 - DNA, 20 bp, synthetic construct
  misc_feature 1..20: note = Description of Artificial Sequence: Synthetic oligonucleotide
  misc_feature 1..20: note = Target: FXN; (+) strand; PAM type: YTN; PAM sequence: CTC
  source 1..20: mol_type = other DNA
atatgttccatcttctctgg

SEQ ID NO: 37209 - DNA, 20 bp, synthetic construct
  misc_feature 1..20: note = Description of Artificial Sequence: Synthetic oligonucleotide
  misc_feature 1..20: note = Target: FXN; (+) strand; PAM type: YTN; PAM sequence: TTC
  source 1..20: mol_type = other DNA
catcttctctggctgtatag

SEQ ID NO: 37210 - DNA, 20 bp, synthetic construct
  misc_feature 1..20: note = Description of Artificial Sequence: Synthetic oligonucleotide
  misc_feature 1..20: note = Target: FXN; (+) strand; PAM type: YTN; PAM sequence: CTT
  source 1..20: mol_type = other DNA
ctctggctgtatagtttaag

SEQ ID NO: 37211 - DNA, 20 bp, synthetic construct
  misc_feature 1..20: note = Description of Artificial Sequence: Synthetic oligonucleotide
  misc_feature 1..20: note = Target: FXN; (+) strand; PAM type: YTN; PAM sequence: TTC
  source 1..20: mol_type = other DNA
tctggctgtatagtttaagg

SEQ ID NO: 37212 - DNA, 20 bp, synthetic construct
  misc_feature 1..20: note = Description of Artificial Sequence: Synthetic oligonucleotide
  misc_feature 1..20: note = Target: FXN; (+) strand; PAM type: YTN; PAM sequence: CTC
  source 1..20: mol_type = other DNA
tggctgtatagtttaaggaa

SEQ ID NO: 37213 - DNA, 20 bp, synthetic construct
  misc_feature 1..20: note = Description of Artificial Sequence: Synthetic oligonucleotide
  misc_feature 1..20: note = Target: FXN; (+) strand; PAM type: YTN; PAM sequence: CTG
  source 1..20: mol_type = other DNA
gctgtatagtttaaggaatg

SEQ ID NO: 37214 - DNA, 20 bp, synthetic construct
  misc_feature 1..20: note = Description of Artificial Sequence: Synthetic oligonucleotide
  misc_feature 1..20: note = Target: FXN; (+) strand; PAM type: YTN; PAM sequence: CTG
  source 1..20: mol_type = other DNA
tatagtttaaggaatggaag

SEQ ID NO: 37215 - DNA, 20 bp, synthetic construct
  misc_feature 1..20: note = Description of Artificial Sequence: Synthetic oligonucleotide
  misc_feature 1..20: note = Target: FXN; (+) strand; PAM type: YTN; PAM sequence: TTT
  source 1..20: mol_type = other DNA
aaggaatggaaggcaccaga

SEQ ID NO: 37216 - DNA, 20 bp, synthetic construct
  misc_feature 1..20: note = Description of Artificial Sequence: Synthetic oligonucleotide
  misc_feature 1..20: note = Target: FXN; (+) strand; PAM type: YTN; PAM sequence: TTA
  source 1..20: mol_type = other DNA
aggaatggaaggcaccagaa

SEQ ID NO: 37217 - DNA, 20 bp, synthetic construct
  misc_feature 1..20: note = Description of Artificial Sequence: Synthetic oligonucleotide
  misc_feature 1..20: note = Target: FXN; (+) strand; PAM type: YTN; PAM sequence: TTT
  source 1..20: mol_type = other DNA
attgaaatgtttattagctg

SEQ ID NO: 37218 - DNA, 20 bp, synthetic construct
  misc_feature 1..20: note = Description of Artificial Sequence: Synthetic oligonucleotide
  misc_feature 1..20: note = Target: FXN; (+) strand; PAM type: YTN; PAM sequence: TTA
  source 1..20: mol_type = other DNA
ttgaaatgtttattagctga

SEQ ID NO: 37219 - DNA, 20 bp, synthetic construct
  misc_feature 1..20: note = Description of Artificial Sequence: Synthetic oligonucleotide
  misc_feature 1..20: note = Target: FXN; (+) strand; PAM type: YTN; PAM sequence: TTG
  source 1..20: mol_type = other DNA
aaatgtttattagctgaaga

SEQ ID NO: 37220 - DNA, 20 bp, synthetic construct
  misc_feature 1..20: note = Description of Artificial Sequence: Synthetic oligonucleotide
  misc_feature 1..20: note = Target: FXN; (+) strand; PAM type: YTN; PAM sequence: TTT
  source 1..20: mol_type = other DNA
attagctgaagatttattta

SEQ ID NO: 37221 - DNA, 20 bp, synthetic construct
  misc_feature 1..20: note = Description of Artificial Sequence: Synthetic oligonucleotide
  misc_feature 1..20: note = Target: FXN; (+) strand; PAM type: YTN; PAM sequence: TTA
  source 1..20: mol_type = other DNA
ttagctgaagatttatttag

SEQ ID NO: 37222 - DNA, 20 bp, synthetic construct
  misc_feature 1..20: note = Description of Artificial Sequence: Synthetic oligonucleotide
  misc_feature 1..20: note = Target: FXN; (+) strand; PAM type: YTN; PAM sequence: TTA
  source 1..20: mol_type = other DNA
gctgaagatttatttagaca

SEQ ID NO: 37223 - DNA, 20 bp, synthetic construct
  misc_feature 1..20: note = Description of Artificial Sequence: Synthetic oligonucleotide
  misc_feature 1..20: note = Target: FXN; (+) strand; PAM type: YTN; PAM sequence: CTG
  source 1..20: mol_type = other DNA
aagatttatttagacagttg

SEQ ID NO: 37224 - DNA, 20 bp, synthetic construct
  misc_feature 1..20: note = Description of Artificial Sequence: Synthetic oligonucleotide
  misc_feature 1..20: note = Target: FXN; (+) strand; PAM type: YTN; PAM sequence: TTT
  source 1..20: mol_type = other DNA
atttagacagttgaggaaaa

SEQ ID NO: 37225 - DNA, 20 bp, synthetic construct
  misc_feature 1..20: note = Description of Artificial Sequence: Synthetic oligonucleotide
  misc_feature 1..20: note = Target: FXN; (+) strand; PAM type: YTN; PAM sequence: TTA
  source 1..20: mol_type = other DNA
tttagacagttgaggaaaac

SEQ ID NO: 37226 - DNA, 20 bp, synthetic construct
  misc_feature 1..20: note = Description of Artificial Sequence: Synthetic oligonucleotide
  misc_feature 1..20: note = Target: FXN; (+) strand; PAM type: YTN; PAM sequence: TTT
  source 1..20: mol_type = other DNA
agacagttgaggaaaacatc

SEQ ID NO: 37227 - DNA, 20 bp, synthetic construct
  misc_feature 1..20: note = Description of Artificial Sequence: Synthetic oligonucleotide
  misc_feature 1..20: note = Target: FXN; (+) strand; PAM type: YTN; PAM sequence: TTA
  source 1..20: mol_type = other DNA
gacagttgaggaaaacatca

SEQ ID NO: 37228 - DNA, 20 bp, synthetic construct
  misc_feature 1..20: note = Description of Artificial Sequence: Synthetic oligonucleotide
  misc_feature 1..20: note = Target: FXN; (+) strand; PAM type: YTN; PAM sequence: TTG
  source 1..20: mol_type = other DNA
aggaaaacatcagcacccag

SEQ ID NO: 37229 - DNA, 20 bp, synthetic construct
  misc_feature 1..20: note = Description of Artificial Sequence: Synthetic oligonucleotide
  misc_feature 1..20: note = Target: FXN; (+) strand; PAM type: YTN; PAM sequence: TTG
  source 1..20: mol_type = other DNA
gctctcaaagattttcttct

SEQ ID NO: 37230 - DNA, 20 bp, synthetic construct
  misc_feature 1..20: note = Description of Artificial Sequence: Synthetic oligonucleotide
  misc_feature 1..20: note = Target: FXN; (+) strand; PAM type: YTN; PAM sequence: CTC
  source 1..20: mol_type = other DNA
tcaaagattttcttctcctg

SEQ ID NO: 37231 - DNA, 20 bp, synthetic construct
  misc_feature 1..20: note = Description of Artificial Sequence: Synthetic oligonucleotide
  misc_feature 1..20: note = Target: FXN; (+) strand; PAM type: YTN; PAM sequence: CTC
  source 1..20: mol_type = other DNA
aaagattttcttctcctgtg

SEQ ID NO: 37232 - DNA, 20 bp, synthetic construct
  misc_feature 1..20: note = Description of Artificial Sequence: Synthetic oligonucleotide
  misc_feature 1..20: note = Target: FXN; (+) strand; PAM type: YTN; PAM sequence: TTT
  source 1..20: mol_type = other DNA
tcttctcctgtggaaagtca

SEQ ID NO: 37233 - DNA, 20 bp, synthetic construct
  misc_feature 1..20: note = Description of Artificial Sequence: Synthetic oligonucleotide
  misc_feature 1..20: note = Target: FXN; (+) strand; PAM type: YTN; PAM sequence: TTT
  source 1..20: mol_type = other DNA
cttctcctgtggaaagtcag

SEQ ID NO: 37234 - DNA, 20 bp, synthetic construct
  misc_feature 1..20: note = Description of Artificial Sequence: Synthetic oligonucleotide
  misc_feature 1..20: note = Target: FXN; (+) strand; PAM type: YTN; PAM sequence: TTC
  source 1..20: mol_type = other DNA
ttctcctgtggaaagtcaga

SEQ ID NO: 37235 - DNA, 20 bp, synthetic construct
  misc_feature 1..20: note = Description of Artificial Sequence: Synthetic oligonucleotide
  misc_feature 1..20: note = Target: FXN; (+) strand; PAM type: YTN; PAM sequence: CTT
  source 1..20: mol_type = other DNA
ctcctgtggaaagtcagacc

SEQ ID NO: 37236 - DNA, 20 bp, synthetic construct
  misc_feature 1..20: note = Description of Artificial Sequence: Synthetic oligonucleotide
  misc_feature 1..20: note = Target: FXN; (+) strand; PAM type: YTN; PAM sequence: TTC
  source 1..20: mol_type = other DNA
tcctgtggaaagtcagacct

SEQ ID NO: 37237 - DNA, 20 bp, synthetic construct
  misc_feature 1..20: note = Description of Artificial Sequence: Synthetic oligonucleotide
  misc_feature 1..20: note = Target: FXN; (+) strand; PAM type: YTN; PAM sequence: CTC
  source 1..20: mol_type = other DNA
ctgtggaaagtcagacctct

SEQ ID NO: 37238 - DNA, 20 bp, synthetic construct
  misc_feature 1..20: note = Description of Artificial Sequence: Synthetic oligonucleotide
  misc_feature 1..20: note = Target: FXN; (+) strand; PAM type: YTN; PAM sequence: CTG
  source 1..20: mol_type = other DNA
tggaaagtcagacctctgag

SEQ ID NO: 37239 - DNA, 20 bp, synthetic construct
  misc_feature 1..20: note = Description of Artificial Sequence: Synthetic oligonucleotide
  misc_feature 1..20: note = Target: FXN; (+) strand; PAM type: YTN; PAM sequence: CTC
  source 1..20: mol_type = other DNA
tgaggccccatccaggtaga

SEQ ID NO: 37240 - DNA, 20 bp, synthetic construct
  misc_feature 1..20: note = Description of Artificial Sequence: Synthetic oligonucleotide
  misc_feature 1..20: note = Target: FXN; (+) strand; PAM type: YTN; PAM sequence: CTG
  source 1..20: mol_type = other DNA
aggccccatccaggtagaag

SEQ ID NO: 37241 - DNA, 20 bp, synthetic construct
  misc_feature 1..20: note = Description of Artificial Sequence: Synthetic oligonucleotide
  misc_feature 1..20: note = Target: FXN; (+) strand; PAM type: YTN; PAM sequence: CTA
  source 1..20: mol_type = other DNA
gtgcaagaagggcctctgct

SEQ ID NO: 37242 - DNA, 20 bp, synthetic construct
  misc_feature 1..20: note = Description of Artificial Sequence: Synthetic oligonucleotide
  misc_feature 1..20: note = Target: FXN; (+) strand; PAM type: YTN; PAM sequence: CTC
  source 1..20: mol_type = other DNA
tgctgtccacttgtgtttct

SEQ ID NO: 37243 - DNA, 20 bp, synthetic construct
  misc_feature 1..20: note = Description of Artificial Sequence: Synthetic oligonucleotide
  misc_feature 1..20: note = Target: FXN; (+) strand; PAM type: YTN; PAM sequence: CTG
  source 1..20: mol_type = other DNA
ctgtccacttgtgtttctgt

SEQ ID NO: 37244 - DNA, 20 bp, synthetic construct
  misc_feature 1..20: note = Description of Artificial Sequence: Synthetic oligonucleotide
  misc_feature 1..20: note = Target: FXN; (+) strand; PAM type: YTN; PAM sequence: CTG
  source 1..20: mol_type = other DNA
tccacttgtgtttctgtgat

SEQ ID NO: 37245 - DNA, 20 bp, synthetic construct
  misc_feature 1..20: note = Description of Artificial Sequence: Synthetic oligonucleotide
  misc_feature 1..20: note = Target: FXN; (+) strand; PAM type: YTN; PAM sequence: CTT
  source 1..20: mol_type = other DNA
gtgtttctgtgatctgtggg

SEQ ID NO: 37246 - DNA, 20 bp, synthetic construct
  misc_feature 1..20: note = Description of Artificial Sequence: Synthetic oligonucleotide
  misc_feature 1..20: note = Target: FXN; (+) strand; PAM type: YTN; PAM sequence: TTG
  source 1..20: mol_type = other DNA
tgtttctgtgatctgtggga

SEQ ID NO: 37247 - DNA, 20 bp, synthetic construct
  misc_feature 1..20: note = Description of Artificial Sequence: Synthetic oligonucleotide
  misc_feature 1..20: note = Target: FXN; (+) strand; PAM type: YTN; PAM sequence: TTT
  source 1..20: mol_type = other DNA
ctgtgatctgtgggaacatt

SEQ ID NO: 37248 - DNA, 20 bp, synthetic construct
  misc_feature 1..20: note = Description of Artificial Sequence: Synthetic oligonucleotide
  misc_feature 1..20: note = Target: FXN; (+) strand; PAM type: YTN; PAM sequence: TTC
  source 1..20: mol_type = other DNA
tgtgatctgtgggaacattg

SEQ ID NO: 37249 - DNA, 20 bp, synthetic construct
  misc_feature 1..20: note = Description of Artificial Sequence: Synthetic oligonucleotide
  misc_feature 1..20: note = Target: FXN; (+) strand; PAM type: YTN; PAM sequence: CTG
  source 1..20: mol_type = other DNA
tgatctgtgggaacattgtt

SEQ ID NO: 37250 - DNA, 20 bp, synthetic construct
  misc_feature 1..20: note = Description of Artificial Sequence: Synthetic oligonucleotide
  misc_feature 1..20: note = Target: FXN; (+) strand; PAM type: YTN; PAM sequence: CTG
  source 1..20: mol_type = other DNA
tgggaacattgttaacgcca

SEQ ID NO: 37251 - DNA, 20 bp, synthetic construct
  misc_feature 1..20: note = Description of Artificial Sequence: Synthetic oligonucleotide
  misc_feature 1..20: note = Target: FXN; (+) strand; PAM type: YTN; PAM sequence: TTG
  source 1..20: mol_type = other DNA
ttaacgccacatcttgacct

SEQ ID NO: 37252 - DNA, 20 bp, synthetic construct
  misc_feature 1..20: note = Description of Artificial Sequence: Synthetic oligonucleotide
  misc_feature 1..20: note = Target: FXN; (+) strand; PAM type: YTN; PAM sequence: TTA
  source 1..20: mol_type = other DNA
acgccacatcttgacctcaa

SEQ ID NO: 37253 - DNA, 20 bp, synthetic construct
  misc_feature 1..20: note = Description of Artificial Sequence: Synthetic oligonucleotide
  misc_feature 1..20: note = Target: FXN; (+) strand; PAM type: YTN; PAM sequence: CTT
  source 1..20: mol_type = other DNA
gacctcaaattgtttagctc

SEQ ID NO: 37254 - DNA, 20 bp, synthetic construct
  misc_feature 1..20: note = Description of Artificial Sequence: Synthetic oligonucleotide
  misc_feature 1..20: note = Target: FXN; (+) strand; PAM type: YTN; PAM sequence: TTG
  source 1..20: mol_type = other DNA
acctcaaattgtttagctcc

SEQ ID NO: 37255 - DNA, 20 bp, synthetic construct
  misc_feature 1..20: note = Description of Artificial Sequence: Synthetic oligonucleotide
  misc_feature 1..20: note = Target: FXN; (+) strand; PAM type: YTN; PAM sequence: CTC
  source 1..20: mol_type = other DNA
aaattgtttagctcctggcc

SEQ ID NO: 37256 - DNA, 20 bp, synthetic construct
  misc_feature 1..20: note = Description of Artificial Sequence: Synthetic oligonucleotide
  misc_feature 1..20: note = Target: FXN; (+) strand; PAM type: YTN; PAM sequence: TTG
  source 1..20: mol_type = other DNA
tttagctcctggccagacac

SEQ ID NO: 37257 - DNA, 20 bp, synthetic construct
  misc_feature 1..20: note = Description of Artificial Sequence: Synthetic oligonucleotide
  misc_feature 1..20: note = Target: FXN; (+) strand; PAM type: YTN; PAM sequence: TTT
  source 1..20: mol_type = other DNA
agctcctggccagacacggt

SEQ ID NO: 37258 - DNA, 20 bp, synthetic construct
  misc_feature 1..20: note = Description of Artificial Sequence: Synthetic oligonucleotide
  misc_feature 1..20: note = Target: FXN; (+) strand; PAM type: YTN; PAM sequence: TTA
  source 1..20: mol_type = other DNA
gctcctggccagacacggtg

SEQ ID NO: 37259 - DNA, 20 bp, synthetic construct
  misc_feature 1..20: note = Description of Artificial Sequence: Synthetic oligonucleotide
  misc_feature 1..20: note = Target: FXN; (+) strand; PAM type: YTN; PAM sequence: CTC
  source 1..20: mol_type = other DNA
ctggccagacacggtggctc

SEQ ID NO: 37260 - DNA, 20 bp, synthetic construct
  misc_feature 1..20: note = Description of Artificial Sequence: Synthetic oligonucleotide
  misc_feature 1..20: note = Target: FXN; (+) strand; PAM type: YTN; PAM sequence: CTG
  source 1..20: mol_type = other DNA
gccagacacggtggctcaca

SEQ ID NO: 37261 - DNA, 20 bp, synthetic construct
  misc_feature 1..20: note = Description of Artificial Sequence: Synthetic oligonucleotide
  misc_feature 1..20: note = Target: FXN; (+) strand; PAM type: YTN; PAM sequence: CTC
  source 1..20: mol_type = other DNA
acacctgtaatcccagcact

SEQ ID NO: 37262 - DNA, 20 bp, synthetic construct
  misc_feature 1..20: note = Description of Artificial Sequence: Synthetic oligonucleotide
  misc_feature 1..20: note = Target: FXN; (+) strand; PAM type: YTN; PAM sequence: CTG
  source 1..20: mol_type = other DNA
taatcccagcactttgagag

SEQ ID NO: 37263 - DNA, 20 bp, synthetic construct
  misc_feature 1..20: note = Description of Artificial Sequence: Synthetic oligonucleotide
  misc_feature 1..20: note = Target: FXN; (+) strand; PAM type: YTN; PAM sequence: CTT
  source 1..20: mol_type = other DNA
tgagaggctgaggcaggtgg

SEQ ID NO: 37264 - DNA, 20 bp, synthetic construct
  misc_feature 1..20: note = Description of Artificial Sequence: Synthetic oligonucleotide
  misc_feature 1..20: note = Target: FXN; (+) strand; PAM type: YTN; PAM sequence: TTT
  source 1..20: mol_type = other DNA
gagaggctgaggcaggtgga

SEQ ID NO: 37265 - DNA, 20 bp, synthetic construct
  misc_feature 1..20: note = Description of Artificial Sequence: Synthetic oligonucleotide
  misc_feature 1..20: note = Target: FXN; (+) strand; PAM type: YTN; PAM sequence: TTG
  source 1..20: mol_type = other DNA
agaggctgaggcaggtggat

SEQ ID NO: 37266 - DNA, 20 bp, synthetic construct
  misc_feature 1..20: note = Description of Artificial Sequence: Synthetic oligonucleotide
  misc_feature 1..20: note = Target: FXN; (+) strand; PAM type: YTN; PAM sequence: CTG
  source 1..20: mol_type = other DNA
aggcaggtggatcacctgag

SEQ ID NO: 37267 - DNA, 20 bp, synthetic construct
  misc_feature 1..20: note = Description of Artificial Sequence: Synthetic oligonucleotide
  misc_feature 1..20: note = Target: FXN; (+) strand; PAM type: YTN; PAM sequence: CTG
  source 1..20: mol_type = other DNA
aggttaggagttcgaggcca

SEQ ID NO: 37268 - DNA, 20 bp, synthetic construct
  misc_feature 1..20: note = Description of Artificial Sequence: Synthetic oligonucleotide
  misc_feature 1..20: note = Target: FXN; (+) strand; PAM type: YTN; PAM sequence: TTA
  source 1..20: mol_type = other DNA
ggagttcgaggccagcctgg

SEQ ID NO: 37269 - DNA, 20 bp, synthetic construct
  misc_feature 1..20: note = Description of Artificial Sequence: Synthetic oligonucleotide
  misc_feature 1..20: note = Target: FXN; (+) strand; PAM type: YTN; PAM sequence: TTC
  source 1..20: mol_type = other DNA
gaggccagcctggtcaacat

SEQ ID NO: 37270 - DNA, 20 bp, synthetic construct
  misc_feature 1..20: note = Description of Artificial Sequence: Synthetic oligonucleotide
  misc_feature 1..20: note = Target: FXN; (+) strand; PAM type: YTN; PAM sequence: CTG
  source 1..20: mol_type = other DNA
gtcaacatggtaaaaccccg

SEQ ID NO: 37271 - DNA, 20 bp, synthetic construct
  misc_feature 1..20: note = Description of Artificial Sequence: Synthetic oligonucleotide
  misc_feature 1..20: note = Target: FXN; (+) strand; PAM type: YTN; PAM sequence: CTC
  source 1..20: mol_type = other DNA
tactaaaaatacaaaaatta

SEQ ID NO: 37272 - DNA, 20 bp, synthetic construct
  misc_feature 1..20: note = Description of Artificial Sequence: Synthetic oligonucleotide
  misc_feature 1..20: note = Target: FXN; (+) strand; PAM type: YTN; PAM sequence: CTA
  source 1..20: mol_type = other DNA
ctaaaaatacaaaaattagc

SEQ ID NO: 37273 - DNA, 20 bp, synthetic construct
  misc_feature 1..20: note = Description of Artificial Sequence: Synthetic oligonucleotide
  misc_feature 1..20: note = Target: FXN; (+) strand; PAM type: YTN; PAM sequence: CTA
  source 1..20: mol_type = other DNA
aaaatacaaaaattagctgg

SEQ ID NO: 37274 - DNA, 20 bp, synthetic construct
  misc_feature 1..20: note = Description of Artificial Sequence: Synthetic oligonucleotide
  misc_feature 1..20: note = Target: FXN; (+) strand; PAM type: YTN; PAM sequence: TTA
  source 1..20: mol_type = other DNA
gctggccgtagtggcgcacg

SEQ ID NO: 37275 - DNA, 20 bp, synthetic construct
  misc_feature 1..20: note = Description of Artificial Sequence: Synthetic oligonucleotide
  misc_feature 1..20: note = Target: FXN; (+) strand; PAM type: YTN; PAM sequence: CTG
  source 1..20: mol_type = other DNA
gccgtagtggcgcacgcctg

SEQ ID NO: 37276 - DNA, 20 bp, synthetic construct
  misc_feature 1..20: note = Description of Artificial Sequence: Synthetic oligonucleotide
  misc_feature 1..20: note = Target: FXN; (+) strand; PAM type: YTN; PAM sequence: CTG
  source 1..20: mol_type = other DNA
ttatcccagctactcgggag

SEQ ID NO: 37277 - DNA, 20 bp, synthetic construct
  misc_feature 1..20: note = Description of Artificial Sequence: Synthetic oligonucleotide
  misc_feature 1..20: note = Target: FXN; (+) strand; PAM type: YTN; PAM sequence: TTA
  source 1..20: mol_type = other DNA
tcccagctactcgggaggct

SEQ ID NO: 37278 - DNA, 20 bp, synthetic construct
  misc_feature 1..20: note = Description of Artificial Sequence: Synthetic oligonucleotide
  misc_feature 1..20: note = Target: FXN; (+) strand; PAM type: YTN; PAM sequence: CTA
  source 1..20: mol_type = other DNA
ctcgggaggctgaggcagga

SEQ ID NO: 37279 - DNA, 20 bp, synthetic construct
  misc_feature 1..20: note = Description of Artificial Sequence: Synthetic oligonucleotide
  misc_feature 1..20: note = Target: FXN; (+) strand; PAM type: YTN; PAM sequence: CTC
  source 1..20: mol_type = other DNA
gggaggctgaggcaggagaa

SEQ ID NO: 37280 - DNA, 20 bp, synthetic construct
  misc_feature 1..20: note = Description of Artificial Sequence: Synthetic oligonucleotide
  misc_feature 1..20: note = Target: FXN; (+) strand; PAM type: YTN; PAM sequence: CTG
  source 1..20: mol_type = other DNA
aggcaggagaattgcttgaa

SEQ ID NO: 37281 - DNA, 20 bp, synthetic construct
  misc_feature 1..20: note = Description of Artificial Sequence: Synthetic oligonucleotide
  misc_feature 1..20: note = Target: FXN; (+) strand; PAM type: YTN; PAM sequence: TTG
  source 1..20: mol_type = other DNA
cttgaacctgggtggtggag

SEQ ID NO: 37282 - DNA, 20 bp, synthetic construct
  misc_feature 1..20: note = Description of Artificial Sequence: Synthetic oligonucleotide
  misc_feature 1..20: note = Target: FXN; (+) strand; PAM type: YTN; PAM sequence: CTT
  source 1..20: mol_type = other DNA
gaacctgggtggtggaggtt

SEQ ID NO: 37283 - DNA, 20 bp, synthetic construct
  misc_feature 1..20: note = Description of Artificial Sequence: Synthetic oligonucleotide
  misc_feature 1..20: note = Target: FXN; (+) strand; PAM type: YTN; PAM sequence: TTG
  source 1..20: mol_type = other DNA
aacctgggtggtggaggttg

SEQ ID NO: 37284 - DNA, 20 bp, synthetic construct
  misc_feature 1..20: note = Description of Artificial Sequence: Synthetic oligonucleotide
  misc_feature 1..20: note = Target: FXN; (+) strand; PAM type: YTN; PAM sequence: CTG
  source 1..20: mol_type = other DNA
ggtggtggaggttgcagtga

SEQ ID NO: 37285 - DNA, 20 bp, synthetic construct
  misc_feature 1..20: note = Description of Artificial Sequence: Synthetic oligonucleotide
  misc_feature 1..20: note = Target: FXN; (+) strand; PAM type: YTN; PAM sequence: TTG
  source 1..20: mol_type = other DNA
cagtgagccgagattacacc

SEQ ID NO: 37286 - DNA, 20 bp, synthetic construct
  misc_feature 1..20: note = Description of Artificial Sequence: Synthetic oligonucleotide
  misc_feature 1..20: note = Target: FXN; (+) strand; PAM type: YTN; PAM sequence: TTA
  source 1..20: mol_type = other DNA
caccactgcactccagcctg

SEQ ID NO: 37287 - DNA, 20 bp, synthetic construct
  misc_feature 1..20: note = Description of Artificial Sequence: Synthetic oligonucleotide
  misc_feature 1..20: note = Target: FXN; (+) strand; PAM type: YTN; PAM sequence: CTG
  source 1..20: mol_type = other DNA
cactccagcctgggtgacaa

SEQ ID NO: 37288 - DNA, 20 bp, synthetic construct
  misc_feature 1..20: note = Description of Artificial Sequence: Synthetic oligonucleotide
  misc_feature 1..20: note = Target: FXN; (+) strand; PAM type: YTN; PAM sequence: CTC
  source 1..20: mol_type = other DNA
cagcctgggtgacaagaggg

SEQ ID NO: 37289 - DNA, 20 bp, synthetic construct
  misc_feature 1..20: note = Description of Artificial Sequence: Synthetic oligonucleotide
  misc_feature 1..20: note = Target: FXN; (+) strand; PAM type: YTN; PAM sequence: CTG
  source 1..20: mol_type = other DNA
ggtgacaagagggaaactcc

SEQ ID NO: 37290 - DNA, 20 bp, synthetic construct
  misc_feature 1..20: note = Description of Artificial Sequence: Synthetic oligonucleotide
  misc_feature 1..20: note = Target: FXN; (+) strand; PAM type: YTN; PAM sequence: CTC
  source 1..20: mol_type = other DNA
cattaaaaaaatgtaattcc

SEQ ID NO: 37291 - DNA, 20 bp, synthetic construct
  misc_feature 1..20: note = Description of Artificial Sequence: Synthetic oligonucleotide
  misc_feature 1..20: note = Target: FXN; (+) strand; PAM type: YTN; PAM sequence: TTA
  source 1..20: mol_type = other DNA
aaaaaatgtaattcccgtgt

SEQ ID NO: 37292 - DNA, 20 bp, synthetic construct
  misc_feature 1..20: note = Description of Artificial Sequence: Synthetic oligonucleotide
  misc_feature 1..20: note = Target: FXN; (+) strand; PAM type: YTN; PAM sequence: TTC
  source 1..20: mol_type = other DNA
ccgtgtctgccatcttaagt

SEQ ID NO: 37293 - DNA, 20 bp, synthetic construct
  misc_feature 1..20: note = Description of Artificial Sequence: Synthetic oligonucleotide
  misc_feature 1..20: note = Target: FXN; (+) strand; PAM type: YTN; PAM sequence: CTG
  source 1..20: mol_type = other DNA
ccatcttaagtgtaaaggtg

SEQ ID NO: 37294 - DNA, 20 bp, synthetic construct
  misc_feature 1..20: note = Description of Artificial Sequence: Synthetic oligonucleotide
  misc_feature 1..20: note = Target: FXN; (+) strand; PAM type: YTN; PAM sequence: CTT
  source 1..20: mol_type = other DNA
aagtgtaaaggtggctaaat

SEQ ID NO: 37295 - DNA, 20 bp, synthetic construct
  misc_feature 1..20: note = Description of Artificial Sequence: Synthetic oligonucleotide
  misc_feature 1..20: note = Target: FXN; (+) strand; PAM type: YTN; PAM sequence: TTA
  source 1..20: mol_type = other DNA
agtgtaaaggtggctaaatt

SEQ ID NO: 37296 - DNA, 20 bp, synthetic construct
  misc_feature 1..20: note = Description of Artificial Sequence: Synthetic oligonucleotide
  misc_feature 1..20: note = Target: FXN; (+) strand; PAM type: YTN; PAM sequence: CTA
  source 1..20: mol_type = other DNA
aattatatagaaaaataaga

SEQ ID NO: 37297 - DNA, 20 bp, synthetic construct
  misc_feature 1..20: note = Description of Artificial Sequence: Synthetic oligonucleotide
  misc_feature 1..20: note = Target: FXN; (+) strand; PAM type: YTN; PAM sequence: TTA
  source 1..20: mol_type = other DNA
tatagaaaaataagacaata

SEQ ID NO: 37298 - DNA, 20 bp, synthetic construct
  misc_feature 1..20: note = Description of Artificial Sequence: Synthetic oligonucleotide
  misc_feature 1..20: note = Target: FXN; (+) strand; PAM type: YTN; PAM sequence: TTT
  source 1..20: mol_type = other DNA
cccaattacattcctttcct

SEQ ID NO: 37299 - DNA, 20 bp, synthetic construct
  misc_feature 1..20: note = Description of Artificial Sequence: Synthetic oligonucleotide
  misc_feature 1..20: note = Target: FXN; (+) strand; PAM type: YTN; PAM sequence: TTC
  source 1..20: mol_type = other DNA
ccaattacattcctttccta

SEQ ID NO: 37300 - DNA, 20 bp, synthetic construct
  misc_feature 1..20: note = Description of Artificial Sequence: Synthetic oligonucleotide
  misc_feature 1..20: note = Target: FXN; (+) strand; PAM type: YTN; PAM sequence: TTA
  source 1..20: mol_type = other DNA
cattcctttcctaccgcact

SEQ ID NO: 37301 - DNA, 20 bp, synthetic construct
  misc_feature 1..20: note = Description of Artificial Sequence: Synthetic oligonucleotide
  misc_feature 1..20: note = Target: FXN; (+) strand; PAM type: YTN; PAM sequence: TTC
  source 1..20: mol_type = other DNA
ctttcctaccgcactctatg

SEQ ID NO: 37302 - DNA, 20 bp, synthetic construct
  misc_feature 1..20: note = Description of Artificial Sequence: Synthetic oligonucleotide
  misc_feature 1..20: note = Target: FXN; (+) strand; PAM type: YTN; PAM sequence: CTT
  source 1..20: mol_type = other DNA
tcctaccgcactctatgatg

SEQ ID NO: 37303 - DNA, 20 bp, synthetic construct
  misc_feature 1..20: note = Description of Artificial Sequence: Synthetic oligonucleotide
  misc_feature 1..20: note = Target: FXN; (+) strand; PAM type: YTN; PAM sequence: TTT
  source 1..20: mol_type = other DNA
cctaccgcactctatgatgc

SEQ ID NO: 37304 - DNA, 20 bp, synthetic construct
  misc_feature 1..20: note = Description of Artificial Sequence: Synthetic oligonucleotide
  misc_feature 1..20: note = Target: FXN; (+) strand; PAM type: YTN; PAM sequence: TTC
  source 1..20: mol_type = other DNA
ctaccgcactctatgatgct

SEQ ID NO: 37305 - DNA, 20 bp, synthetic construct
  misc_feature 1..20: note = Description of Artificial Sequence: Synthetic oligonucleotide
  misc_feature 1..20: note = Target: FXN; (+) strand; PAM type: YTN; PAM sequence: CTA
  source 1..20: mol_type = other DNA
ccgcactctatgatgctagc

SEQ ID NO: 37306 - DNA, 20 bp, synthetic construct
  misc_feature 1..20: note = Description of Artificial Sequence: Synthetic oligonucleotide
  misc_feature 1..20: note = Target: FXN; (+) strand; PAM type: YTN; PAM sequence: CTC
  source 1..20: mol_type = other DNA
tatgatgctagctgagattt

SEQ ID NO: 37307 - DNA, 20 bp, synthetic construct
  misc_feature 1..20: note = Description of Artificial Sequence: Synthetic oligonucleotide
  misc_feature 1..20: note = Target: FXN; (+) strand; PAM type: YTN; PAM sequence: CTA
  source 1..20: mol_type = other DNA
tgatgctagctgagattttt

SEQ ID NO: 37308 - DNA, 20 bp, synthetic construct
  misc_feature 1..20: note = Description of Artificial Sequence: Synthetic oligonucleotide
  misc_feature 1..20: note = Target: FXN; (+) strand; PAM type: YTN; PAM sequence: CTA
  source 1..20: mol_type = other DNA
gctgagatttttccaaaaga

SEQ ID NO: 37309 - DNA, 20 bp, synthetic construct
  misc_feature 1..20: note = Description of Artificial Sequence: Synthetic oligonucleotide
  misc_feature 1..20: note = Target: FXN; (+) strand; PAM type: YTN; PAM sequence: CTG
  source 1..20: mol_type = other DNA
agatttttccaaaagaaaat

SEQ ID NO: 37310 - DNA, 20 bp, synthetic construct
  misc_feature 1..20: note = Description of Artificial Sequence: Synthetic oligonucleotide
  misc_feature 1..20: note = Target: FXN; (+) strand; PAM type: YTN; PAM sequence: TTT
  source 1..20: mol_type = other DNA
ttccaaaagaaaatggctta

SEQ ID NO: 37311 - DNA, 20 bp, synthetic construct
  misc_feature 1..20: note = Description of Artificial Sequence: Synthetic oligonucleotide
  misc_feature 1..20: note = Target: FXN; (+) strand; PAM type: YTN; PAM sequence: TTT
  source 1..20: mol_type = other DNA
tccaaaagaaaatggcttaa

SEQ ID NO: 37312 - DNA, 20 bp, synthetic construct
  misc_feature 1..20: note = Description of Artificial Sequence: Synthetic oligonucleotide
  misc_feature 1..20: note = Target: FXN; (+) strand; PAM type: YTN; PAM sequence: TTT
  source 1..20: mol_type = other DNA
ccaaaagaaaatggcttaaa

SEQ ID NO: 37313 - DNA, 20 bp, synthetic construct
  misc_feature 1..20: note = Description of Artificial Sequence: Synthetic oligonucleotide
  misc_feature 1..20: note = Target: FXN; (+) strand; PAM type: YTN; PAM sequence: TTC
  source 1..20: mol_type = other DNA
caaaagaaaatggcttaaat

SEQ ID NO: 37314 - DNA, 20 bp, synthetic construct
  misc_feature 1..20: note = Description of Artificial Sequence: Synthetic oligonucleotide
  misc_feature 1..20: note = Target: FXN; (+) strand; PAM type: YTN; PAM sequence: CTT
  source 1..20: mol_type = other DNA
aaataaaaccctaagagaaa

SEQ ID NO: 37315 - DNA, 20 bp, synthetic construct
  misc_feature 1..20: note = Description of Artificial Sequence: Synthetic oligonucleotide
  misc_feature 1..20: note = Target: FXN; (+) strand; PAM type: YTN; PAM sequence: TTA
  source 1..20: mol_type = other DNA
aataaaaccctaagagaaag

SEQ ID NO: 37316 - DNA, 20 bp, synthetic construct
  misc_feature 1..20: note = Description of Artificial Sequence: Synthetic oligonucleotide
  misc_feature 1..20: note = Target: FXN; (+) strand; PAM type: YTN; PAM sequence: CTA
  source 1..20: mol_type = other DNA
agagaaagaaaaactttaaa

SEQ ID NO: 37317 - DNA, 20 bp, synthetic construct
  misc_feature 1..20: note = Description of Artificial Sequence: Synthetic oligonucleotide
  misc_feature 1..20: note = Target: FXN; (+) strand; PAM type: YTN; PAM sequence: CTT
  source 1..20: mol_type = other DNA
taaatccctccaaagctcaa

SEQ ID NO: 37318 - DNA, 20 bp, synthetic construct
  misc_feature 1..20: note = Description of Artificial Sequence: Synthetic oligonucleotide
  misc_feature 1..20: note = Target: FXN; (+) strand; PAM type: YTN; PAM sequence: TTT
  source 1..20: mol_type = other DNA
aaatccctccaaagctcaaa

SEQ ID NO: 37319 - DNA, 20 bp, synthetic construct
  misc_feature 1..20: note = Description of Artificial Sequence: Synthetic oligonucleotide
  misc_feature 1..20: note = Target: FXN; (+) strand; PAM type: YTN; PAM sequence: TTA
  source 1..20: mol_type = other DNA
aatccctccaaagctcaaaa

SEQ ID NO: 37320 - DNA, 20 bp, synthetic construct
  misc_feature 1..20: note = Description of Artificial Sequence: Synthetic oligonucleotide
  misc_feature 1..20: note = Target: FXN; (+) strand; PAM type: YTN; PAM sequence: CTC
  source 1..20: mol_type = other DNA
caaagctcaaaagtaataga

SEQ ID NO: 37321 - DNA, 20 bp, synthetic construct
  misc_feature 1..20: note = Description of Artificial Sequence: Synthetic oligonucleotide
  misc_feature 1..20: note = Target: FXN; (+) strand; PAM type: YTN; PAM sequence: CTC
  source 1..20: mol_type = other DNA
aaaagtaatagaaacagatg

SEQ ID NO: 37322 - DNA, 20 bp, synthetic construct
  misc_feature 1..20: note = Description of Artificial Sequence: Synthetic oligonucleotide
  misc_feature 1..20: note = Target: FXN; (+) strand; PAM type: YTN; PAM sequence: TTT
  source 1..20: mol_type = other DNA
ggagtcaggatttctctgta

SEQ ID NO: 37323 - DNA, 20 bp, synthetic construct
  misc_feature 1..20: note = Description of Artificial Sequence: Synthetic oligonucleotide
  misc_feature 1..20: note = Target: FXN; (+) strand; PAM type: YTN; PAM sequence: TTG
  source 1..20: mol_type = other DNA
gagtcaggatttctctgtaa

SEQ ID NO: 37324 - DNA, 20 bp, synthetic construct
  misc_feature 1..20: note = Description of Artificial Sequence: Synthetic oligonucleotide
  misc_feature 1..20: note = Target: FXN; (+) strand; PAM type: YTN; PAM sequence: TTT
  source 1..20: mol_type = other DNA
ctctgtaagattgcctaggc

SEQ ID NO: 37325 - DNA, 20 bp, synthetic construct
  misc_feature 1..20: note = Description of Artificial Sequence: Synthetic oligonucleotide
  misc_feature 1..20: note = Target: FXN; (+) strand; PAM type: YTN; PAM sequence: TTC
  source 1..20: mol_type = other DNA
tctgtaagattgcctaggct

SEQ ID NO: 37326 - DNA, 20 bp, synthetic construct
  misc_feature 1..20: note = Description of Artificial Sequence: Synthetic oligonucleotide
  misc_feature 1..20: note = Target: FXN; (+) strand; PAM type: YTN; PAM sequence: CTC
  source 1..20: mol_type = other DNA
tgtaagattgcctaggctgt

SEQ ID NO: 37327 - DNA, 20 bp, synthetic construct
  misc_feature 1..20: note = Description of Artificial Sequence: Synthetic oligonucleotide
  misc_feature 1..20: note = Target: FXN; (+) strand; PAM type: YTN; PAM sequence: CTG
  source 1..20: mol_type = other DNA
taagattgcctaggctgtgt

SEQ ID NO: 37328 - DNA, 20 bp, synthetic construct
  misc_feature 1..20: note = Description of Artificial Sequence: Synthetic oligonucleotide
  misc_feature 1..20: note = Target: FXN; (+) strand; PAM type: YTN; PAM sequence: TTG
  source 1..20: mol_type = other DNA
cctaggctgtgtactgcaca

SEQ ID NO: 37329 - DNA, 20 bp, synthetic construct
  misc_feature 1..20: note = Description of Artificial Sequence: Synthetic oligonucleotide
  misc_feature 1..20: note = Target: FXN; (+) strand; PAM type: YTN; PAM sequence: CTA
  source 1..20: mol_type = other DNA
ggctgtgtactgcacatctc

SEQ ID NO: 37330 - DNA, 20 bp, synthetic construct
  misc_feature 1..20: note = Description of Artificial Sequence: Synthetic oligonucleotide
  misc_feature 1..20: note = Target: FXN; (+) strand; PAM type: YTN; PAM sequence: CTG
  source 1..20: mol_type = other DNA
tgtactgcacatctccaggt

SEQ ID NO: 37331 - DNA, 20 bp, synthetic construct
  misc_feature 1..20: note = Description of Artificial Sequence: Synthetic oligonucleotide
  misc_feature 1..20: note = Target: FXN; (+) strand; PAM type: YTN; PAM sequence: CTG
  source 1..20: mol_type = other DNA
cacatctccaggtgccactg

SEQ ID NO: 37332 - DNA, 20 bp, synthetic construct
  misc_feature 1..20: note = Description of Artificial Sequence: Synthetic oligonucleotide
  misc_feature 1..20: note = Target: FXN; (+) strand; PAM type: YTN; PAM sequence: CTC
  source 1..20: mol_type = other DNA
caggtgccactgttgacaga

SEQ ID NO: 37333 - DNA, 20 bp, synthetic construct
  misc_feature 1..20: note = Description of Artificial Sequence: Synthetic oligonucleotide
  misc_feature 1..20: note = Target: FXN; (+) strand; PAM type: YTN; PAM sequence: CTG
  source 1..20: mol_type = other DNA
ttgacagagattataactac

SEQ ID NO: 37334 - DNA, 20 bp, synthetic construct
  misc_feature 1..20: note = Description of Artificial Sequence: Synthetic oligonucleotide
  misc_feature 1..20: note = Target: FXN; (+) strand; PAM type: YTN; PAM sequence: TTG
  source 1..20: mol_type = other DNA
acagagattataactacaat

SEQ ID NO: 37335 - DNA, 20 bp, synthetic construct
  misc_feature 1..20: note = Description of Artificial Sequence: Synthetic oligonucleotide
  misc_feature 1..20: note = Target: FXN; (+) strand; PAM type: YTN; PAM sequence: TTA
  source 1..20: mol_type = other DNA
taactacaatgtgaagtgaa

SEQ ID NO: 37336 - DNA, 20 bp, synthetic construct
  misc_feature 1..20: note = Description of Artificial Sequence: Synthetic oligonucleotide
  misc_feature 1..20: note = Target: FXN; (+) strand; PAM type: YTN; PAM sequence: CTA
  source 1..20: mol_type = other DNA
caatgtgaagtgaatggtgc

SEQ ID NO: 37337 - DNA, 20 bp, synthetic construct
  misc_feature 1..20: note = Description of Artificial Sequence: Synthetic oligonucleotide
  misc_feature 1..20: note = Target: FXN; (+) strand; PAM type: YTN; PAM sequence: CTG
  source 1..20: mol_type = other DNA
acagttatgcaaaccgtcca

SEQ ID NO: 37338 - DNA, 20 bp, synthetic construct
  misc_feature 1..20: note = Description of Artificial Sequence: Synthetic oligonucleotide
  misc_feature 1..20: note = Target: FXN; (+) strand; PAM type: YTN; PAM sequence: TTA
  source 1..20: mol_type = other DNA
tgcaaaccgtccagagcata

SEQ ID NO: 37339 - DNA, 20 bp, synthetic construct
  misc_feature 1..20: note = Description of Artificial Sequence: Synthetic oligonucleotide
  misc_feature 1..20: note = Target: FXN; (+) strand; PAM type: YTN; PAM sequence: CTG
  source 1..20: mol_type = other DNA
atcctgctgggattcctctt

SEQ ID NO: 37340 - DNA, 20 bp, synthetic construct
  misc_feature 1..20: note = Description of Artificial Sequence: Synthetic oligonucleotide
  misc_feature 1..20: note = Target: FXN; (+) strand; PAM type: YTN; PAM sequence: CTG
  source 1..20: mol_type = other DNA
ctgggattcctcttgccagt

SEQ ID NO: 37341 - DNA, 20 bp, synthetic construct
  misc_feature 1..20: note = Description of Artificial Sequence: Synthetic oligonucleotide
  misc_feature 1..20: note = Target: FXN; (+) strand; PAM type: YTN; PAM sequence: CTG
  source 1..20: mol_type = other DNA
ggattcctcttgccagtcca

SEQ ID NO: 37342 - DNA, 20 bp, synthetic construct
  misc_feature 1..20: note = Description of Artificial Sequence: Synthetic oligonucleotide
  misc_feature 1..20: note = Target: FXN; (+) strand; PAM type: YTN; PAM sequence: TTC
  source 1..20: mol_type = other DNA
ctcttgccagtccatcagca

SEQ ID NO: 37343 - DNA, 20 bp, synthetic construct
  misc_feature 1..20: note = Description of Artificial Sequence: Synthetic oligonucleotide
  misc_feature 1..20: note = Target: FXN; (+) strand; PAM type: YTN; PAM sequence: CTC
  source 1..20: mol_type = other DNA
ttgccagtccatcagcagtt

SEQ ID NO: 37344 - DNA, 20 bp, synthetic construct
  misc_feature 1..20: note = Description of Artificial Sequence: Synthetic oligonucleotide
  misc_feature 1..20: note = Target: FXN; (+) strand; PAM type: YTN; PAM sequence: CTT
  source 1..20: mol_type = other DNA
gccagtccatcagcagttcc

SEQ ID NO: 37345 - DNA, 20 bp, synthetic construct
  misc_feature 1..20: note = Description of Artificial Sequence: Synthetic oligonucleotide
  misc_feature 1..20: note = Target: FXN; (+) strand; PAM type: YTN; PAM sequence: TTG
  source 1..20: mol_type = other DNA
ccagtccatcagcagttccc

SEQ ID NO: 37346 - DNA, 20 bp, synthetic construct
  misc_feature 1..20: note = Description of Artificial Sequence: Synthetic oligonucleotide
  misc_feature 1..20: note = Target: FXN; (+) strand; PAM type: YTN; PAM sequence: TTC
  source 1..20: mol_type = other DNA
cccttgaaagtttcaccaaa

SEQ ID NO: 37347 - DNA, 20 bp, synthetic construct
  misc_feature 1..20: note = Description of Artificial Sequence: Synthetic oligonucleotide
  misc_feature 1..20: note = Target: FXN; (+) strand; PAM type: YTN; PAM sequence: CTT
  source 1..20: mol_type = other DNA
gaaagtttcaccaaacatcc

SEQ ID NO: 37348 - DNA, 20 bp, synthetic construct
  misc_feature 1..20: note = Description of Artificial Sequence: Synthetic oligonucleotide
  misc_feature 1..20: note = Target: FXN; (+) strand; PAM type: YTN; PAM sequence: TTG
  source 1..20: mol_type = other DNA
aaagtttcaccaaacatccc

SEQ ID NO: 37349 - DNA, 20 bp, synthetic construct
  misc_feature 1..20: note = Description of Artificial Sequence: Synthetic oligonucleotide
  misc_feature 1..20: note = Target: FXN; (+) strand; PAM type: YTN; PAM sequence: TTT
  source 1..20: mol_type = other DNA
caccaaacatcccttaaatc

SEQ ID NO: 37350 - DNA, 20 bp, synthetic construct
  misc_feature 1..20: note = Description of Artificial Sequence: Synthetic oligonucleotide
  misc_feature 1..20: note = Target: FXN; (+) strand; PAM type: YTN; PAM sequence: TTC
  source 1..20: mol_type = other DNA
accaaacatcccttaaatct

SEQ ID NO: 37351 - DNA, 20 bp, synthetic construct
  misc_feature 1..20: note = Description of Artificial Sequence: Synthetic oligonucleotide
  misc_feature 1..20: note = Target: FXN; (+) strand; PAM type: YTN; PAM sequence: CTT
  source 1..20: mol_type = other DNA
aaatctgccctctcctgccc

SEQ ID NO: 37352 - DNA, 20 bp, synthetic construct
  misc_feature 1..20: note = Description of Artificial Sequence: Synthetic oligonucleotide
  misc_feature 1..20: note = Target: FXN; (+) strand; PAM type: YTN; PAM sequence: TTA
  source 1..20: mol_type = other DNA
aatctgccctctcctgcccg

SEQ ID NO: 37353 - DNA, 20 bp, synthetic construct
  misc_feature 1..20: note = Description of Artificial Sequence: Synthetic oligonucleotide
  misc_feature 1..20: note = Target: FXN; (+) strand; PAM type: YTN; PAM sequence: CTG
  source 1..20: mol_type = other DNA
ccctctcctgcccgtcccca

SEQ ID NO: 37354 - DNA, 20 bp, synthetic construct
  misc_feature 1..20: note = Description of Artificial Sequence: Synthetic oligonucleotide
  misc_feature 1..20: note = Target: FXN; (+) strand; PAM type: YTN; PAM sequence: CTC
  source 1..20: mol_type = other DNA
tcctgcccgtccccagtgga

SEQ ID NO: 37355 - DNA, 20 bp, synthetic construct
  misc_feature 1..20: note = Description of Artificial Sequence: Synthetic oligonucleotide
  misc_feature 1..20: note = Target: FXN; (+) strand; PAM type: YTN; PAM sequence: CTC
  source 1..20: mol_type = other DNA
ctgcccgtccccagtggagg

SEQ ID NO: 37356 - DNA, 20 bp, synthetic construct
  misc_feature 1..20: note = Description of Artificial Sequence: Synthetic oligonucleotide
  misc_feature 1..20: note = Target: FXN; (+) strand; PAM type: YTN; PAM sequence: CTG
  source 1..20: mol_type = other DNA
cccgtccccagtggaggtcc

SEQ ID NO: 37357 - DNA, 20 bp, synthetic construct
  misc_feature 1..20: note = Description of Artificial Sequence: Synthetic oligonucleotide
  misc_feature 1..20: note = Target: FXN; (+) strand; PAM type: YTN; PAM sequence: CTC
  source 1..20: mol_type = other DNA
atcatttttcacctgcattt

SEQ ID NO: 37358 - DNA, 20 bp, synthetic construct
  misc_feature 1..20: note = Description of Artificial Sequence: Synthetic oligonucleotide
  misc_feature 1..20: note = Target: FXN; (+) strand; PAM type: YTN; PAM sequence: TTT
  source 1..20: mol_type = other DNA
ttcacctgcatttttgcagg

SEQ ID NO: 37359 - DNA, 20 bp, synthetic construct
  misc_feature 1..20: note = Description of Artificial Sequence: Synthetic oligonucleotide
  misc_feature 1..20: note = Target: FXN; (+) strand; PAM type: YTN; PAM sequence: TTT
  source 1..20: mol_type = other DNA
tcacctgcatttttgcagga

SEQ ID NO: 37360 - DNA, 20 bp, synthetic construct
  misc_feature 1..20: note = Description of Artificial Sequence: Synthetic oligonucleotide
  misc_feature 1..20: note = Target: FXN; (+) strand; PAM type: YTN; PAM sequence: TTT
  source 1..20: mol_type = other DNA
cacctgcatttttgcaggag

SEQ ID NO: 37361 - DNA, 20 bp, synthetic construct
  misc_feature 1..20: note = Description of Artificial Sequence: Synthetic oligonucleotide
  misc_feature 1..20: note = Target: FXN; (+) strand; PAM type: YTN; PAM sequence: TTC
  source 1..20: mol_type = other DNA
acctgcatttttgcaggagc

SEQ ID NO: 37362 - DNA, 20 bp, synthetic construct
  misc_feature 1..20: note = Description of Artificial Sequence: Synthetic oligonucleotide
  misc_feature 1..20: note = Target: FXN; (+) strand; PAM type: YTN; PAM sequence: CTG
  source 1..20: mol_type = other DNA
catttttgcaggagctttct

SEQ ID NO: 37363 - DNA, 20 bp, synthetic construct
  misc_feature 1..20: note = Description of Artificial Sequence: Synthetic oligonucleotide
  misc_feature 1..20: note = Target: FXN; (+) strand; PAM type: YTN; PAM sequence: TTT
  source 1..20: mol_type = other DNA
ttgcaggagctttcttatat

SEQ ID NO: 37364 - DNA, 20 bp, synthetic construct
  misc_feature 1..20: note = Description of Artificial Sequence: Synthetic oligonucleotide
  misc_feature 1..20: note = Target: FXN; (+) strand; PAM type: YTN; PAM sequence: TTT
  source 1..20: mol_type = other DNA
tgcaggagctttcttatatc

SEQ ID NO: 37365 - DNA, 20 bp, synthetic construct
  misc_feature 1..20: note = Description of Artificial Sequence: Synthetic oligonucleotide
  misc_feature 1..20: note = Target: FXN; (+) strand; PAM type: YTN; PAM sequence: TTT
  source 1..20: mol_type = other DNA
gcaggagctttcttatatcc

SEQ ID NO: 37366 - DNA, 20 bp, synthetic construct
  misc_feature 1..20: note = Description of Artificial Sequence: Synthetic oligonucleotide
  misc_feature 1..20: note = Target: FXN; (+) strand; PAM type: YTN; PAM sequence: TTG
  source 1..20: mol_type = other DNA
caggagctttcttatatcca

SEQ ID NO: 37367 - DNA, 20 bp, synthetic construct
  misc_feature 1..20: note = Description of Artificial Sequence: Synthetic oligonucleotide
  misc_feature 1..20: note = Target: FXN; (+) strand; PAM type: YTN; PAM sequence: CTT
  source 1..20: mol_type = other DNA
tcttatatccaccttcctcc

SEQ ID NO: 37368 - DNA, 20 bp, synthetic construct
  misc_feature 1..20: note = Description of Artificial Sequence: Synthetic oligonucleotide
  misc_feature 1..20: note = Target: FXN; (+) strand; PAM type: YTN; PAM sequence: TTT
  source 1..20: mol_type = other DNA
cttatatccaccttcctcct

SEQ ID NO: 37369 - DNA, 20 bp, synthetic construct
  misc_feature 1..20: note = Description of Artificial Sequence: Synthetic oligonucleotide
  misc_feature 1..20: note = Target: FXN; (+) strand; PAM type: YTN; PAM sequence: TTC
  source 1..20: mol_type = other DNA
ttatatccaccttcctcctt

SEQ ID NO: 37370 - DNA, 20 bp, synthetic construct
  misc_feature 1..20: note = Description of Artificial Sequence: Synthetic oligonucleotide
  misc_feature 1..20: note = Target: FXN; (+) strand; PAM type: YTN; PAM sequence: CTT
  source 1..20: mol_type = other DNA
atatccaccttcctcctttt

SEQ ID NO: 37371 - DNA, 20 bp, synthetic construct
  misc_feature 1..20: note = Description of Artificial Sequence: Synthetic oligonucleotide
  misc_feature 1..20: note = Target: FXN; (+) strand; PAM type: YTN; PAM sequence: TTA
  source 1..20: mol_type = other DNA
tatccaccttcctccttttc

SEQ ID NO: 37372 - DNA, 20 bp, synthetic construct
  misc_feature 1..20: note = Description of Artificial Sequence: Synthetic oligonucleotide
  misc_feature 1..20: note = Target: FXN; (+) strand; PAM type: YTN; PAM sequence: CTT
  source 1..20: mol_type = other DNA
cctccttttctctcagccca

SEQ ID NO: 37373 - DNA, 20 bp, synthetic construct
  misc_feature 1..20: note = Description of Artificial Sequence: Synthetic oligonucleotide
  misc_feature 1..20: note = Target: FXN; (+) strand; PAM type: YTN; PAM sequence: TTC
  source 1..20: mol_type = other DNA
ctccttttctctcagcccat

SEQ ID NO: 37374 - DNA, 20 bp, synthetic construct
  misc_feature 1..20: note = Description of Artificial Sequence: Synthetic oligonucleotide
  misc_feature 1..20: note = Target: FXN; (+) strand; PAM type: YTN; PAM sequence: CTC
  source 1..20: mol_type = other DNA
cttttctctcagcccatcat

SEQ ID NO: 37375 - DNA, 20 bp, synthetic construct
  misc_feature 1..20: note = Description of Artificial Sequence: Synthetic oligonucleotide
  misc_feature 1..20: note = Target: FXN; (+) strand; PAM type: YTN; PAM sequence: CTT
  source 1..20: mol_type = other DNA
ttctctcagcccatcatcta

SEQ ID NO: 37376 - DNA, 20 bp, synthetic construct
  misc_feature 1..20: note = Description of Artificial Sequence: Synthetic oligonucleotide
  misc_feature 1..20: note = Target: FXN; (+) strand; PAM type: YTN; PAM sequence: TTT
  source 1..20: mol_type = other DNA
tctctcagcccatcatctag

SEQ ID NO: 37377 - DNA, 20 bp, synthetic construct
  misc_feature 1..20: note = Description of Artificial Sequence: Synthetic oligonucleotide
  misc_feature 1..20: note = Target: FXN; (+) strand; PAM type: YTN; PAM sequence: TTT
  source 1..20: mol_type = other DNA
ctctcagcccatcatctagc

SEQ ID NO: 37378 - DNA, 20 bp, synthetic construct
  misc_feature 1..20: note = Description of Artificial Sequence: Synthetic oligonucleotide
  misc_feature 1..20: note = Target: FXN; (+) strand; PAM type: YTN; PAM sequence: TTC
  source 1..20: mol_type = other DNA
tctcagcccatcatctagct

SEQ ID NO: 37379 - DNA, 20 bp, synthetic construct
  misc_feature 1..20: note = Description of Artificial Sequence: Synthetic oligonucleotide
  misc_feature 1..20: note = Target: FXN; (+) strand; PAM type: YTN; PAM sequence: CTC
  source 1..20: mol_type = other DNA
tcagcccatcatctagctac

SEQ ID NO: 37380 - DNA, 20 bp, synthetic construct
  misc_feature 1..20: note = Description of Artificial Sequence: Synthetic oligonucleotide
  misc_feature 1..20: note = Target: FXN; (+) strand; PAM type: YTN; PAM sequence: CTC
  source 1..20: mol_type = other DNA
agcccatcatctagctacac

SEQ ID NO: 37381 - DNA, 20 bp, synthetic construct
  misc_feature 1..20: note = Description of Artificial Sequence: Synthetic oligonucleotide
  misc_feature 1..20: note = Target: FXN; (+) strand; PAM type: YTN; PAM sequence: CTA
  source 1..20: mol_type = other DNA
gctacacagtctccagggta

SEQ ID NO: 37382 - DNA, 20 bp, synthetic construct
  misc_feature 1..20: note = Description of Artificial Sequence: Synthetic oligonucleotide
  misc_feature 1..20: note = Target: FXN; (+) strand; PAM type: YTN; PAM sequence: CTA
  source 1..20: mol_type = other DNA
cacagtctccagggtaagct

SEQ ID NO: 37383 - DNA, 20 bp, synthetic construct
  misc_feature 1..20: note = Description of Artificial Sequence: Synthetic oligonucleotide
  misc_feature 1..20: note = Target: FXN; (+) strand; PAM type: YTN; PAM sequence: CTC
  source 1..20: mol_type = other DNA
cagggtaagctttcagaaag

SEQ ID NO: 37384 - DNA, 20 bp, synthetic construct
  misc_feature 1..20: note = Description of Artificial Sequence: Synthetic oligonucleotide
  misc_feature 1..20: note = Target: FXN; (+) strand; PAM type: YTN; PAM sequence: CTT
  source 1..20: mol_type = other DNA
tcagaaaggcaatctcttgt

SEQ ID NO: 37385 - DNA, 20 bp, synthetic construct
  misc_feature 1..20: note = Description of Artificial Sequence: Synthetic oligonucleotide
  misc_feature 1..20: note = Target: FXN; (+) strand; PAM type: YTN; PAM sequence: TTT
  source 1..20: mol_type = other DNA
cagaaaggcaatctcttgtc

SEQ ID NO: 37386 - DNA, 20 bp, synthetic construct
  misc_feature 1..20: note = Description of Artificial Sequence: Synthetic oligonucleotide
  misc_feature 1..20: note = Target: FXN; (+) strand; PAM type: YTN; PAM sequence: TTC
  source 1..20: mol_type = other DNA
agaaaggcaatctcttgtct

SEQ ID NO: 37387 - DNA, 20 bp, synthetic construct
  misc_feature 1..20: note = Description of Artificial Sequence: Synthetic oligonucleotide
  misc_feature 1..20: note = Target: FXN; (+) strand; PAM type: YTN; PAM sequence: CTC
  source 1..20: mol_type = other DNA
ttgtctgtaaaacctaagca

SEQ ID NO: 37388 - DNA, 20 bp, synthetic construct
  misc_feature 1..20: note = Description of Artificial Sequence: Synthetic oligonucleotide
  misc_feature 1..20: note = Target: FXN; (+) strand; PAM type: YTN; PAM sequence: CTT
  source 1..20: mol_type = other DNA
gtctgtaaaacctaagcagg

SEQ ID NO: 37389 - DNA, 20 bp, synthetic construct
  misc_feature 1..20: note = Description of Artificial Sequence: Synthetic oligonucleotide
  misc_feature 1..20: note = Target: FXN; (+) strand; PAM type: YTN; PAM sequence: TTG
  source 1..20: mol_type = other DNA
tctgtaaaacctaagcagga

SEQ ID NO: 37390 - DNA, 20 bp, synthetic construct
  misc_feature 1..20: note = Description of Artificial Sequence: Synthetic oligonucleotide
  misc_feature 1..20: note = Target: FXN; (+) strand; PAM type: YTN; PAM sequence: CTG
  source 1..20: mol_type = other DNA
taaaacctaagcaggaccaa

SEQ ID NO: 37391 - DNA, 20 bp, synthetic construct
  misc_feature 1..20: note = Description of Artificial Sequence: Synthetic oligonucleotide
  misc_feature 1..20: note = Target: FXN; (+) strand; PAM type: YTN; PAM sequence: CTA
  source 1..20: mol_type = other DNA
agcaggaccaaggccaagtt

SEQ ID NO: 37392 - DNA, 20 bp, synthetic construct
  misc_feature 1..20: note = Description of Artificial Sequence: Synthetic oligonucleotide
  misc_feature 1..20: note = Target: FXN; (+) strand; PAM type: YTN; PAM sequence: TTT
  source 1..20: mol_type = other DNA
cttagcctgaaaaatgtgct

SEQ ID NO: 37393 - DNA, 20 bp, synthetic construct
  misc_feature 1..20: note = Description of Artificial Sequence: Synthetic oligonucleotide
  misc_feature 1..20: note = Target: FXN; (+) strand; PAM type: YTN; PAM sequence: TTC
  source 1..20: mol_type = other DNA
ttagcctgaaaaatgtgctt

SEQ ID NO: 37394 - DNA, 20 bp, synthetic construct
  misc_feature 1..20: note = Description of Artificial Sequence: Synthetic oligonucleotide
  misc_feature 1..20: note = Target: FXN; (+) strand; PAM type: YTN; PAM sequence: CTT
  source 1..20: mol_type = other DNA
agcctgaaaaatgtgctttt

SEQ ID NO: 37395 - DNA, 20 bp, synthetic construct
  misc_feature 1..20: note = Description of Artificial Sequence: Synthetic oligonucleotide
  misc_feature 1..20: note = Target: FXN; (+) strand; PAM type: YTN; PAM sequence: TTA
  source 1..20: mol_type = other DNA
gcctgaaaaatgtgcttttc

SEQ ID NO: 37396 - DNA, 20 bp, synthetic construct
  misc_feature 1..20: note = Description of Artificial Sequence: Synthetic oligonucleotide
  misc_feature 1..20: note = Target: FXN; (+) strand; PAM type: YTN; PAM sequence: CTG
  source 1..20: mol_type = other DNA
aaaaatgtgcttttctgact

SEQ ID NO: 37397 - DNA, 20 bp, synthetic construct
  misc_feature 1..20: note = Description of Artificial Sequence: Synthetic oligonucleotide
  misc_feature 1..20: note = Target: FXN; (+) strand; PAM type: YTN; PAM sequence: CTT
  source 1..20: mol_type = other DNA
ttctgactgaactgttcagg

SEQ ID NO: 37398 - DNA, 20 bp, synthetic construct
  misc_feature 1..20: note = Description of Artificial Sequence: Synthetic oligonucleotide
  misc_feature 1..20: note = Target: FXN; (+) strand; PAM type: YTN; PAM sequence: TTT
  source 1..20: mol_type = other DNA
tctgactgaactgttcaggc

SEQ ID NO: 37399 - DNA, 20 bp, synthetic construct
  misc_feature 1..20: note = Description of Artificial Sequence: Synthetic oligonucleotide
  misc_feature 1..20: note = Target: FXN; (+) strand; PAM type: YTN; PAM sequence: TTT
  source 1..20: mol_type = other DNA
ctgactgaactgttcaggca

SEQ ID NO: 37400 - DNA, 20 bp, synthetic construct
  misc_feature 1..20: note = Description of Artificial Sequence: Synthetic oligonucleotide
  misc_feature 1..20: note = Target: FXN; (+) strand; PAM type: YTN; PAM sequence: TTC
  source 1..20: mol_type = other DNA
tgactgaactgttcaggcac

SEQ ID NO: 37401 - DNA, 20 bp, synthetic construct
  misc_feature 1..20: note = Description of Artificial Sequence: Synthetic oligonucleotide
  misc_feature 1..20: note = Target: FXN; (+) strand; PAM type: YTN; PAM sequence: CTG
  source 1..20: mol_type = other DNA
actgaactgttcaggcactg

SEQ ID NO: 37402 - DNA, 20 bp, synthetic construct
  misc_feature 1..20: note = Description of Artificial Sequence: Synthetic oligonucleotide
  misc_feature 1..20: note = Target: FXN; (+) strand; PAM type: YTN; PAM sequence: CTG
  source 1..20: mol_type = other DNA
aactgttcaggcactgactc

SEQ ID NO: 37403 - DNA, 20 bp, synthetic construct
  misc_feature 1..20: note = Description of Artificial Sequence: Synthetic oligonucleotide
  misc_feature 1..20: note = Target: FXN; (+) strand; PAM type: YTN; PAM sequence: CTG
  source 1..20: mol_type = other DNA
ttcaggcactgactctacat

SEQ ID NO: 37404 - DNA, 20 bp, synthetic construct
  misc_feature 1..20: note = Description of Artificial Sequence: Synthetic oligonucleotide
  misc_feature 1..20: note = Target: FXN; (+) strand; PAM type: YTN; PAM sequence: TTC
  source 1..20: mol_type = other DNA
aggcactgactctacatata

SEQ ID NO: 37405 - DNA, 20 bp, synthetic construct
  misc_feature 1..20: note = Description of Artificial Sequence: Synthetic oligonucleotide
  misc_feature 1..20: note = Target: FXN; (+) strand; PAM type: YTN; PAM sequence: CTG
  source 1..20: mol_type = other DNA
actctacatataattatgct

SEQ ID NO: 37406 - DNA, 20 bp, synthetic construct
  misc_feature 1..20: note = Description of Artificial Sequence: Synthetic oligonucleotide
  misc_feature 1..20: note = Target: FXN; (+) strand; PAM type: YTN; PAM sequence: CTC
  source 1..20: mol_type = other DNA
tacatataattatgcttttc

SEQ ID NO: 37407 - DNA, 20 bp, synthetic construct
  misc_feature 1..20: note = Description of Artificial Sequence: Synthetic oligonucleotide
  misc_feature 1..20: note = Target: FXN; (+) strand; PAM type: YTN; PAM sequence: CTA
  source 1..20: mol_type = other DNA
catataattatgcttttcta

SEQ ID NO: 37408 - DNA, 20 bp, synthetic construct
  misc_feature 1..20: note = Description of Artificial Sequence: Synthetic oligonucleotide
  misc_feature 1..20: note = Target: FXN; (+) strand; PAM type: YTN; PAM sequence: TTA
  source 1..20: mol_type = other DNA
tgcttttctaccccctcaca

SEQ ID NO: 37409 - DNA, 20 bp, synthetic construct
  misc_feature 1..20: note = Description of Artificial Sequence: Synthetic oligonucleotide
  misc_feature 1..20: note = Target: FXN; (+) strand; PAM type: YTN; PAM sequence: CTT
  source 1..20: mol_type = other DNA
ttctaccccctcacactcaa

SEQ ID NO: 37410 - DNA, 20 bp, synthetic construct
  misc_feature 1..20: note = Description of Artificial Sequence: Synthetic oligonucleotide
  misc_feature 1..20: note = Target: FXN; (+) strand; PAM type: YTN; PAM sequence: TTT
  source 1..20: mol_type = other DNA
tctaccccctcacactcaac

SEQ ID NO: 37411 - DNA, 20 bp, synthetic construct
  misc_feature 1..20: note = Description of Artificial Sequence: Synthetic oligonucleotide
  misc_feature 1..20: note = Target: FXN; (+) strand; PAM type: YTN; PAM sequence: TTT
  source 1..20: mol_type = other DNA
ctaccccctcacactcaaca

SEQ ID NO: 37412 - DNA, 20 bp, synthetic construct
  misc_feature 1..20: note = Description of Artificial Sequence: Synthetic oligonucleotide
  misc_feature 1..20: note = Target: FXN; (+) strand; PAM type: YTN; PAM sequence: TTC
  source 1..20: mol_type = other DNA
taccccctcacactcaacac

SEQ ID NO: 37413 - DNA, 20 bp, synthetic construct
  misc_feature 1..20: note = Description of Artificial Sequence: Synthetic oligonucleotide
  misc_feature 1..20: note = Target: FXN; (+) strand; PAM type: YTN; PAM sequence: CTA
  source 1..20: mol_type = other DNA
ccccctcacactcaacactt

SEQ ID NO: 37414 - DNA, 20 bp, synthetic construct
  misc_feature 1..20: note = Description of Artificial Sequence: Synthetic oligonucleotide
  misc_feature 1..20: note = Target: FXN; (+) strand; PAM type: YTN; PAM sequence: CTC
  source 1..20: mol_type = other DNA
acactcaacactttgactcc

SEQ ID NO: 37415 - DNA, 20 bp, synthetic construct
  misc_feature 1..20: note = Description of Artificial Sequence: Synthetic oligonucleotide
  misc_feature 1..20: note = Target: FXN; (+) strand; PAM type: YTN; PAM sequence: CTC
  source 1..20: mol_type = other DNA
aacactttgactccagcaat

SEQ ID NO: 37416 - DNA, 20 bp, synthetic construct
  misc_feature 1..20: note = Description of Artificial Sequence: Synthetic oligonucleotide
  misc_feature 1..20: note = Target: FXN; (+) strand; PAM type: YTN; PAM sequence: CTT
  source 1..20: mol_type = other DNA
tgactccagcaatcccaaat

SEQ ID NO: 37417 - DNA, 20 bp, synthetic construct
  misc_feature 1..20: note = Description of Artificial Sequence: Synthetic oligonucleotide
  misc_feature 1..20: note = Target: FXN; (+) strand; PAM type: YTN; PAM sequence: TTT
  source 1..20: mol_type = other DNA
gactccagcaatcccaaatc

SEQ ID NO: 37418 - DNA, 20 bp, synthetic construct
  misc_feature 1..20: note = Description of Artificial Sequence: Synthetic oligonucleotide
  misc_feature 1..20: note = Target: FXN; (+) strand; PAM type: YTN; PAM sequence: TTG
  source 1..20: mol_type = other DNA
actccagcaatcccaaatcc

SEQ ID NO: 37419 - DNA, 20 bp, synthetic construct
  misc_feature 1..20: note = Description of Artificial Sequence: Synthetic oligonucleotide
  misc_feature 1..20: note = Target: FXN; (+) strand; PAM type: YTN; PAM sequence: CTC
  source 1..20: mol_type = other DNA
cagcaatcccaaatccccag

SEQ ID NO: 37420 - DNA, 20 bp, synthetic construct
  misc_feature 1..20: note = Description of Artificial Sequence: Synthetic oligonucleotide
  misc_feature 1..20: note = Target: FXN; (+) strand; PAM type: YTN; PAM sequence: CTA
  source 1..20: mol_type = other DNA
agtgtgctgtgctattttca

SEQ ID NO: 37421 - DNA, 20 bp, synthetic construct
  misc_feature 1..20: note = Description of Artificial Sequence: Synthetic oligonucleotide
  misc_feature 1..20: note = Target: FXN; (+) strand; PAM type: YTN; PAM sequence: CTG
  source 1..20: mol_type = other DNA
tgctattttcacgtggctct

SEQ ID NO: 37422 - DNA, 20 bp, synthetic construct
  misc_feature 1..20: note = Description of Artificial Sequence: Synthetic oligonucleotide
  misc_feature 1..20: note = Target: FXN; (+) strand; PAM type: YTN; PAM sequence: CTA
  source 1..20: mol_type = other DNA
ttttcacgtggctctcagac

SEQ ID NO: 37423 - DNA, 20 bp, synthetic construct
  misc_feature 1..20: note = Description of Artificial Sequence: Synthetic oligonucleotide
  misc_feature 1..20: note = Target: FXN; (+) strand; PAM type: YTN; PAM sequence: TTT
  source 1..20: mol_type = other DNA
tcacgtggctctcagacttg

SEQ ID NO: 37424 - DNA, 20 bp, synthetic construct
  misc_feature 1..20: note = Description of Artificial Sequence: Synthetic oligonucleotide
  misc_feature 1..20: note = Target: FXN; (+) strand; PAM type: YTN; PAM sequence: TTT
  source 1..20: mol_type = other DNA
cacgtggctctcagacttgg

SEQ ID NO: 37425 - DNA, 20 bp, synthetic construct
  misc_feature 1..20: note = Description of Artificial Sequence: Synthetic oligonucleotide
  misc_feature 1..20: note = Target: FXN; (+) strand; PAM type: YTN; PAM sequence: TTC
  source 1..20: mol_type = other DNA
acgtggctctcagacttggc

SEQ ID NO: 37426 - DNA, 20 bp, synthetic construct
  misc_feature 1..20: note = Description of Artificial Sequence: Synthetic oligonucleotide
  misc_feature 1..20: note = Target: FXN; (+) strand; PAM type: YTN; PAM sequence: CTC
  source 1..20: mol_type = other DNA
tcagacttggccagtgctgt

SEQ ID NO: 37427 - DNA, 20 bp, synthetic construct
  misc_feature 1..20: note = Description of Artificial Sequence: Synthetic oligonucleotide
  misc_feature 1..20: note = Target: FXN; (+) strand; PAM type: YTN; PAM sequence: CTC
  source 1..20: mol_type = other DNA
agacttggccagtgctgttt

SEQ ID NO: 37428 - DNA, 20 bp, synthetic construct
  misc_feature 1..20: note = Description of Artificial Sequence: Synthetic oligonucleotide
  misc_feature 1..20: note = Target: FXN; (+) strand; PAM type: YTN; PAM sequence: CTT
  source 1..20: mol_type = other DNA
ggccagtgctgtttccattt

SEQ ID NO: 37429 - DNA, 20 bp, synthetic construct
  misc_feature 1..20: note = Description of Artificial Sequence: Synthetic oligonucleotide
  misc_feature 1..20: note = Target: FXN; (+) strand; PAM type: YTN; PAM sequence: TTG
  source 1..20: mol_type = other DNA
gccagtgctgtttccatttt

SEQ ID NO: 37430 - DNA, 20 bp, synthetic construct
  misc_feature 1..20: note = Description of Artificial Sequence: Synthetic oligonucleotide
  misc_feature 1..20: note = Target: FXN; (+) strand; PAM type: YTN; PAM sequence: CTG
  source 1..20: mol_type = other DNA
tttccattttggtctttatt

SEQ ID NO: 37431 - DNA, 20 bp, synthetic construct
  misc_feature 1..20: note = Description of Artificial Sequence: Synthetic oligonucleotide
  misc_feature 1..20: note = Target: FXN; (+) strand; PAM type: YTN; PAM sequence: TTT
  source 1..20: mol_type = other DNA
ccattttggtctttattccc

SEQ ID NO: 37432 - DNA, 20 bp, synthetic construct
  misc_feature 1..20: note = Description of Artificial Sequence: Synthetic oligonucleotide
  misc_feature 1..20: note = Target: FXN; (+) strand; PAM type: YTN; PAM sequence: TTC
  source 1..20: mol_type = other DNA
cattttggtctttattcccc

SEQ ID NO: 37433 - DNA, 20 bp, synthetic construct
  misc_feature 1..20: note = Description of Artificial Sequence: Synthetic oligonucleotide
  misc_feature 1..20: note = Target: FXN; (+) strand; PAM type: YTN; PAM sequence: TTT
  source 1..20: mol_type = other DNA
tggtctttattccccacatc

SEQ ID NO: 37434 - DNA, 20 bp, synthetic construct
  misc_feature 1..20: note = Description of Artificial Sequence: Synthetic oligonucleotide
  misc_feature 1..20: note = Target: FXN; (+) strand; PAM type: YTN; PAM sequence: TTT
  source 1..20: mol_type = other DNA
ggtctttattccccacatct

SEQ ID NO: 37435 - DNA, 20 bp, synthetic construct
  misc_feature 1..20: note = Description of Artificial Sequence: Synthetic oligonucleotide
  misc_feature 1..20: note = Target: FXN; (+) strand; PAM type: YTN; PAM sequence: TTG
  source 1..20: mol_type = other DNA
gtctttattccccacatctc

SEQ ID NO: 37436 - DNA, 20 bp, synthetic construct
  misc_feature 1..20: note = Description of Artificial Sequence: Synthetic oligonucleotide
  misc_feature 1..20: note = Target: FXN; (+) strand; PAM type: YTN; PAM sequence: CTT
  source 1..20: mol_type = other DNA
tattccccacatctctgcct

SEQ ID NO: 37437 - DNA, 20 bp, synthetic construct
  misc_feature 1..20: note = Description of Artificial Sequence: Synthetic oligonucleotide
  misc_feature 1..20: note = Target: FXN; (+) strand; PAM type: YTN; PAM sequence: TTT
  source 1..20: mol_type = other DNA
attccccacatctctgcctg

SEQ ID NO: 37438 - DNA, 20 bp, synthetic construct
  misc_feature 1..20: note = Description of Artificial Sequence: Synthetic oligonucleotide
  misc_feature 1..20: note = Target: FXN; (+) strand; PAM type: YTN; PAM sequence: TTA
  source 1..20: mol_type = other DNA
ttccccacatctctgcctgg

SEQ ID NO: 37439 - DNA, 20 bp, synthetic construct
  misc_feature 1..20: note = Description of Artificial Sequence: Synthetic oligonucleotide
  misc_feature 1..20: note = Target: FXN; (+) strand; PAM type: YTN; PAM sequence: TTC
  source 1..20: mol_type = other DNA
cccacatctctgcctggggg

SEQ ID NO: 37440 - DNA, 20 bp, synthetic construct
  misc_feature 1..20: note = Description of Artificial Sequence: Synthetic oligonucleotide
  misc_feature 1..20: note = Target: FXN; (+) strand; PAM type: YTN; PAM sequence: CTC
  source 1..20: mol_type = other DNA
tgcctggggggtagattcta

SEQ ID NO: 37441 - DNA, 20 bp, synthetic construct
  misc_feature 1..20: note = Description of Artificial Sequence: Synthetic oligonucleotide
  misc_feature 1..20: note = Target: FXN; (+) strand; PAM type: YTN; PAM sequence: CTG
  source 1..20: mol_type = other DNA
cctggggggtagattctacc

SEQ ID NO: 37442 - DNA, 20 bp, synthetic construct
  misc_feature 1..20: note = Description of Artificial Sequence: Synthetic oligonucleotide
  misc_feature 1..20: note = Target: FXN; (+) strand; PAM type: YTN; PAM sequence: CTG
  source 1..20: mol_type = other DNA
gggggtagattctaccctga

SEQ ID NO: 37443 - DNA, 20 bp, synthetic construct
  misc_feature 1..20: note = Description of Artificial Sequence: Synthetic oligonucleotide
  misc_feature 1..20: note = Target: FXN; (+) strand; PAM type: YTN; PAM sequence: TTC
  source 1..20: mol_type = other DNA
taccctgaaaaatgttcttg

SEQ ID NO: 37444 - DNA, 20 bp, synthetic construct
  misc_feature 1..20: note = Description of Artificial Sequence: Synthetic oligonucleotide
  misc_feature 1..20: note = Target: FXN; (+) strand; PAM type: YTN; PAM sequence: CTA
  source 1..20: mol_type = other DNA
ccctgaaaaatgttcttggc

SEQ ID NO: 37445 - DNA, 20 bp, synthetic construct
  misc_feature 1..20: note = Description of Artificial Sequence: Synthetic oligonucleotide
  misc_feature 1..20: note = Target: FXN; (+) strand; PAM type: YTN; PAM sequence: CTG
  source 1..20: mol_type = other DNA
aaaaatgttcttggcacagc

SEQ ID NO: 37446 - DNA, 20 bp, synthetic construct
  misc_feature 1..20: note = Description of Artificial Sequence: Synthetic oligonucleotide
  misc_feature 1..20: note = Target: FXN; (+) strand; PAM type: YTN; PAM sequence: TTC
  source 1..20: mol_type = other DNA
ttggcacagccttgcaaact

SEQ ID NO: 37447 - DNA, 20 bp, synthetic construct
  misc_feature 1..20: note = Description of Artificial Sequence: Synthetic oligonucleotide
  misc_feature 1..20: note = Target: FXN; (+) strand; PAM type: YTN; PAM sequence: CTT
  source 1..20: mol_type = other DNA
ggcacagccttgcaaactcc

SEQ ID NO: 37448 - DNA, 20 bp, synthetic construct
  misc_feature 1..20: note = Description of Artificial Sequence: Synthetic oligonucleotide
  misc_feature 1..20: note = Target: FXN; (+) strand; PAM type: YTN; PAM sequence: TTG
  source 1..20: mol_type = other DNA
gcacagccttgcaaactcct

SEQ ID NO: 37449 - DNA, 20 bp, synthetic construct
  misc_feature 1..20: note = Description of Artificial Sequence: Synthetic oligonucleotide
  misc_feature 1..20: note = Target: FXN; (+) strand; PAM type: YTN; PAM sequence: CTT
  source 1..20: mol_type = other DNA
gcaaactcctcctccactca

SEQ ID NO: 37450 - DNA, 20 bp, synthetic construct
  misc_feature 1..20: note = Description of Artificial Sequence: Synthetic oligonucleotide
  misc_feature 1..20: note = Target: FXN; (+) strand; PAM type: YTN; PAM sequence: TTG
  source 1..20: mol_type = other DNA
caaactcctcctccactcag

SEQ ID NO: 37451 - DNA, 20 bp, synthetic construct
  misc_feature 1..20: note = Description of Artificial Sequence: Synthetic oligonucleotide
  misc_feature 1..20: note = Target: FXN; (+) strand; PAM type: YTN; PAM sequence: CTC
  source 1..20: mol_type = other DNA
ctcctccactcagcctctgc

SEQ ID NO: 37452 - DNA, 20 bp, synthetic construct
  misc_feature 1..20: note = Description of Artificial Sequence: Synthetic oligonucleotide
  misc_feature 1..20: note = Target: FXN; (+) strand; PAM type: YTN; PAM sequence: CTC
  source 1..20: mol_type = other DNA
ctccactcagcctctgcctg

SEQ ID NO: 37453 - DNA, 20 bp, synthetic construct
  misc_feature 1..20: note = Description of Artificial Sequence: Synthetic oligonucleotide
  misc_feature 1..20: note = Target: FXN; (+) strand; PAM type: YTN; PAM sequence: CTC
  source 1..20: mol_type = other DNA
cactcagcctctgcctggat

SEQ ID NO: 37454 - DNA, 20 bp, synthetic construct
  misc_feature 1..20: note = Description of Artificial Sequence: Synthetic oligonucleotide
  misc_feature 1..20: note = Target: FXN; (+) strand; PAM type: YTN; PAM sequence: CTC
  source 1..20: mol_type = other DNA
agcctctgcctggatgccct

SEQ ID NO: 37455 - DNA, 20 bp, synthetic construct
  misc_feature 1..20: note = Description of Artificial Sequence: Synthetic oligonucleotide
  misc_feature 1..20: note = Target: FXN; (+) strand; PAM type: YTN; PAM sequence: CTC
  source 1..20: mol_type = other DNA
tgcctggatgcccttgattg

SEQ ID NO: 37456 - DNA, 20 bp, synthetic construct
  misc_feature 1..20: note = Description of Artificial Sequence: Synthetic oligonucleotide
  misc_feature 1..20: note = Target: FXN; (+) strand; PAM type: YTN; PAM sequence: CTG
  source 1..20: mol_type = other DNA
cctggatgcccttgattgtt

SEQ ID NO: 37457 - DNA, 20 bp, synthetic construct
  misc_feature 1..20: note = Description of Artificial Sequence: Synthetic oligonucleotide
  misc_feature 1..20: note = Target: FXN; (+) strand; PAM type: YTN; PAM sequence: CTG
  source 1..20: mol_type = other DNA
gatgcccttgattgttccat

SEQ ID NO: 37458 - DNA, 20 bp, synthetic construct
  misc_feature 1..20: note = Description of Artificial Sequence: Synthetic oligonucleotide
  misc_feature 1..20: note = Target: FXN; (+) strand; PAM type: YTN; PAM sequence: CTT
  source 1..20: mol_type = other DNA
gattgttccatgtcctcagc

SEQ ID NO: 37459 - DNA, 20 bp, synthetic construct
  misc_feature 1..20: note = Description of Artificial Sequence: Synthetic oligonucleotide
  misc_feature 1..20: note = Target: FXN; (+) strand; PAM type: YTN; PAM sequence: TTG
  source 1..20: mol_type = other DNA
attgttccatgtcctcagca

SEQ ID NO: 37460 - DNA, 20 bp, synthetic construct
  misc_feature 1..20: note = Description of Artificial Sequence: Synthetic oligonucleotide
  misc_feature 1..20: note = Target: FXN; (+) strand; PAM type: YTN; PAM sequence: TTG
  source 1..20: mol_type = other DNA
ttccatgtcctcagcatacc

SEQ ID NO: 37461 - DNA, 20 bp, synthetic construct
  misc_feature 1..20: note = Description of Artificial Sequence: Synthetic oligonucleotide
  misc_feature 1..20: note = Target: FXN; (+) strand; PAM type: YTN; PAM sequence: TTC
  source 1..20: mol_type = other DNA
catgtcctcagcataccatg

SEQ ID NO: 37462 - DNA, 20 bp, synthetic construct
  misc_feature 1..20: note = Description of Artificial Sequence: Synthetic oligonucleotide
  misc_feature 1..20: note = Target: FXN; (+) strand; PAM type: YTN; PAM sequence: CTC
  source 1..20: mol_type = other DNA
agcataccatgtttgtcttt

SEQ ID NO: 37463 - DNA, 20 bp, synthetic construct
  misc_feature 1..20: note = Description of Artificial Sequence: Synthetic oligonucleotide
  misc_feature 1..20: note = Target: FXN; (+) strand; PAM type: YTN; PAM sequence: TTT
  source 1..20: mol_type = other DNA
gtctttcccagcactgacct

SEQ ID NO: 37464 - DNA, 20 bp, synthetic construct
  misc_feature 1..20: note = Description of Artificial Sequence: Synthetic oligonucleotide
  misc_feature 1..20: note = Target: FXN; (+) strand; PAM type: YTN; PAM sequence: TTG
  source 1..20: mol_type = other DNA
tctttcccagcactgaccta

SEQ ID NO: 37465 - DNA, 20 bp, synthetic construct
  misc_feature 1..20: note = Description of Artificial Sequence: Synthetic oligonucleotide
  misc_feature 1..20: note = Target: FXN; (+) strand; PAM type: YTN; PAM sequence: CTT
  source 1..20: mol_type = other DNA
tcccagcactgacctaccat

SEQ ID NO: 37466 - DNA, 20 bp, synthetic construct
  misc_feature 1..20: note = Description of Artificial Sequence: Synthetic oligonucleotide
  misc_feature 1..20: note = Target: FXN; (+) strand; PAM type: YTN; PAM sequence: TTT
  source 1..20: mol_type = other DNA
cccagcactgacctaccatg

SEQ ID NO: 37467 - DNA, 20 bp, synthetic construct
  misc_feature 1..20: note = Description of Artificial Sequence: Synthetic oligonucleotide
  misc_feature 1..20: note = Target: FXN; (+) strand; PAM type: YTN; PAM sequence: TTC
  source 1..20: mol_type = other DNA
ccagcactgacctaccatgt

SEQ ID NO: 37468 - DNA, 20 bp, synthetic construct
  misc_feature 1..20: note = Description of Artificial Sequence: Synthetic oligonucleotide
  misc_feature 1..20: note = Target: FXN; (+) strand; PAM type: YTN; PAM sequence: CTG
  source 1..20: mol_type = other DNA
acctaccatgtgtcacccct

SEQ ID NO: 37469 - DNA, 20 bp, synthetic construct
  misc_feature 1..20: note = Description of Artificial Sequence: Synthetic oligonucleotide
  misc_feature 1..20: note = Target: FXN; (+) strand; PAM type: YTN; PAM sequence: CTA
  source 1..20: mol_type = other DNA
ccatgtgtcacccctgcttg

SEQ ID NO: 37470 - DNA, 20 bp, synthetic construct
  misc_feature 1..20: note = Description of Artificial Sequence: Synthetic oligonucleotide
  misc_feature 1..20: note = Target: FXN; (+) strand; PAM type: YTN; PAM sequence: CTG
  source 1..20: mol_type = other DNA
cttggctgtaccttccatga

SEQ ID NO: 37471 - DNA, 20 bp, synthetic construct
  misc_feature 1..20: note = Description of Artificial Sequence: Synthetic oligonucleotide
  misc_feature 1..20: note = Target: FXN; (+) strand; PAM type: YTN; PAM sequence: CTT
  source 1..20: mol_type = other DNA
ggctgtaccttccatgaggc

SEQ ID NO: 37472 - DNA, 20 bp, synthetic construct
  misc_feature 1..20: note = Description of Artificial Sequence: Synthetic oligonucleotide
  misc_feature 1..20: note = Target: FXN; (+) strand; PAM type: YTN; PAM sequence: TTG
  source 1..20: mol_type = other DNA
gctgtaccttccatgaggct

SEQ ID NO: 37473 - DNA, 20 bp, synthetic construct
  misc_feature 1..20: note = Description of Artificial Sequence: Synthetic oligonucleotide
  misc_feature 1..20: note = Target: FXN; (+) strand; PAM type: YTN; PAM sequence: CTG
  source 1..20: mol_type = other DNA
taccttccatgaggctagga

SEQ ID NO: 37474 - DNA, 20 bp, synthetic construct
  misc_feature 1..20: note = Description of Artificial Sequence: Synthetic oligonucleotide
  misc_feature 1..20: note = Target: FXN; (+) strand; PAM type: YTN; PAM sequence: CTT
  source 1..20: mol_type = other DNA
ccatgaggctaggactatgt

SEQ ID NO: 37475 - DNA, 20 bp, synthetic construct
  misc_feature 1..20: note = Description of Artificial Sequence: Synthetic oligonucleotide
  misc_feature 1..20: note = Target: FXN; (+) strand; PAM type: YTN; PAM sequence: TTC
  source 1..20: mol_type = other DNA
catgaggctaggactatgtg

SEQ ID NO: 37476 - DNA, 20 bp, synthetic construct
  misc_feature 1..20: note = Description of Artificial Sequence: Synthetic oligonucleotide
  misc_feature 1..20: note = Target: FXN; (+) strand; PAM type: YTN; PAM sequence: CTA
  source 1..20: mol_type = other DNA
ggactatgtgtctcctttgt

SEQ ID NO: 37477 - DNA, 20 bp, synthetic construct
  misc_feature 1..20: note = Description of Artificial Sequence: Synthetic oligonucleotide
  misc_feature 1..20: note = Target: FXN; (+) strand; PAM type: YTN; PAM sequence: CTA
  source 1..20: mol_type = other DNA
tgtgtctcctttgttgactg

SEQ ID NO: 37478 - DNA, 20 bp, synthetic construct
  misc_feature 1..20: note = Description of Artificial Sequence: Synthetic oligonucleotide
  misc_feature 1..20: note = Target: FXN; (+) strand; PAM type: YTN; PAM sequence: CTC
  source 1..20: mol_type = other DNA
ctttgttgactgctgttgcc

SEQ ID NO: 37479 - DNA, 20 bp, synthetic construct
  misc_feature 1..20: note = Description of Artificial Sequence: Synthetic oligonucleotide
  misc_feature 1..20: note = Target: FXN; (+) strand; PAM type: YTN; PAM sequence: CTT
  source 1..20: mol_type = other DNA
tgttgactgctgttgcccta

SEQ ID NO: 37480 - DNA, 20 bp, synthetic construct
  misc_feature 1..20: note = Description of Artificial Sequence: Synthetic oligonucleotide
  misc_feature 1..20: note = Target: FXN; (+) strand; PAM type: YTN; PAM sequence: TTT
  source 1..20: mol_type = other DNA
gttgactgctgttgccctag

SEQ ID NO: 37481 - DNA, 20 bp, synthetic construct
  misc_feature 1..20: note = Description of Artificial Sequence: Synthetic oligonucleotide
  misc_feature 1..20: note = Target: FXN; (+) strand; PAM type: YTN; PAM sequence: TTG
  source 1..20: mol_type = other DNA
ttgactgctgttgccctagc

SEQ ID NO: 37482 - DNA, 20 bp, synthetic construct
  misc_feature 1..20: note = Description of Artificial Sequence: Synthetic oligonucleotide
  misc_feature 1..20: note = Target: FXN; (+) strand; PAM type: YTN; PAM sequence: TTG
  source 1..20: mol_type = other DNA
actgctgttgccctagcatc

SEQ ID NO: 37483 - DNA, 20 bp, synthetic construct
  misc_feature 1..20: note = Description of Artificial Sequence: Synthetic oligonucleotide
  misc_feature 1..20: note = Target: FXN; (+) strand; PAM type: YTN; PAM sequence: CTG
  source 1..20: mol_type = other DNA
ctgttgccctagcatcttgc

SEQ ID NO: 37484 - DNA, 20 bp, synthetic construct
  misc_feature 1..20: note = Description of Artificial Sequence: Synthetic oligonucleotide
  misc_feature 1..20: note = Target: FXN; (+) strand; PAM type: YTN; PAM sequence: CTG
  source 1..20: mol_type = other DNA
ttgccctagcatcttgcaca

SEQ ID NO: 37485 - DNA, 20 bp, synthetic construct
  misc_feature 1..20: note = Description of Artificial Sequence: Synthetic oligonucleotide
  misc_feature 1..20: note = Target: FXN; (+) strand; PAM type: YTN; PAM sequence: TTG
  source 1..20: mol_type = other DNA
ccctagcatcttgcacagtt

SEQ ID NO: 37486 - DNA, 20 bp, synthetic construct
  misc_feature 1..20: note = Description of Artificial Sequence: Synthetic oligonucleotide
  misc_feature 1..20: note = Target: FXN; (+) strand; PAM type: YTN; PAM sequence: CTA
  source 1..20: mol_type = other DNA
gcatcttgcacagttccttg

SEQ ID NO: 37487 - DNA, 20 bp, synthetic construct
  misc_feature 1..20: note = Description of Artificial Sequence: Synthetic oligonucleotide
  misc_feature 1..20: note = Target: FXN; (+) strand; PAM type: YTN; PAM sequence: CTT
  source 1..20: mol_type = other DNA
gcacagttccttgcacacaa

SEQ ID NO: 37488 - DNA, 20 bp, synthetic construct
  misc_feature 1..20: note = Description of Artificial Sequence: Synthetic oligonucleotide
  misc_feature 1..20: note = Target: FXN; (+) strand; PAM type: YTN; PAM sequence: TTG
  source 1..20: mol_type = other DNA
cacagttccttgcacacaat

SEQ ID NO: 37489 - DNA, 20 bp, synthetic construct
  misc_feature 1..20: note = Description of Artificial Sequence: Synthetic oligonucleotide
  misc_feature 1..20: note = Target: FXN; (+) strand; PAM type: YTN; PAM sequence: TTC
  source 1..20: mol_type = other DNA
cttgcacacaattagagctc

SEQ ID NO: 37490 - DNA, 20 bp, synthetic construct
  misc_feature 1..20: note = Description of Artificial Sequence: Synthetic oligonucleotide
  misc_feature 1..20: note = Target: FXN; (+) strand; PAM type: YTN; PAM sequence: CTT
  source 1..20: mol_type = other DNA
gcacacaattagagctctat

SEQ ID NO: 37491 - DNA, 20 bp, synthetic construct
  misc_feature 1..20: note = Description of Artificial Sequence: Synthetic oligonucleotide
  misc_feature 1..20: note = Target: FXN; (+) strand; PAM type: YTN; PAM sequence: TTG
  source 1..20: mol_type = other DNA
cacacaattagagctctata

SEQ ID NO: 37492 - DNA, 20 bp, synthetic construct
  misc_feature 1..20: note = Description of Artificial Sequence: Synthetic oligonucleotide
  misc_feature 1..20: note = Target: FXN; (+) strand; PAM type: YTN; PAM sequence: TTA
  source 1..20: mol_type = other DNA
gagctctataaatgtcaaat

SEQ ID NO: 37493 - DNA, 20 bp, synthetic construct
  misc_feature 1..20: note = Description of Artificial Sequence: Synthetic oligonucleotide
  misc_feature 1..20: note = Target: FXN; (+) strand; PAM type: YTN; PAM sequence: CTC
  source 1..20: mol_type = other DNA
tataaatgtcaaataaatgt

SEQ ID NO: 37494 - DNA, 20 bp, synthetic construct
  misc_feature 1..20: note = Description of Artificial Sequence: Synthetic oligonucleotide
  misc_feature 1..20: note = Target: FXN; (+) strand; PAM type: YTN; PAM sequence: CTA
  source 1..20: mol_type = other DNA
taaatgtcaaataaatgtgt

SEQ ID NO: 37495 - DNA, 20 bp, synthetic construct
  misc_feature 1..20: note = Description of Artificial Sequence: Synthetic oligonucleotide
  misc_feature 1..20: note = Target: FXN; (+) strand; PAM type: YTN; PAM sequence: TTA
  source 1..20: mol_type = other DNA
taattatatgtttaagatag

SEQ ID NO: 37496 - DNA, 20 bp, synthetic construct
  misc_feature 1..20: note = Description of Artificial Sequence: Synthetic oligonucleotide
  misc_feature 1..20: note = Target: FXN; (+) strand; PAM type: YTN; PAM sequence: TTA
  source 1..20: mol_type = other DNA
tatgtttaagatagttgttc

SEQ ID NO: 37497 - DNA, 20 bp, synthetic construct
  misc_feature 1..20: note = Description of Artificial Sequence: Synthetic oligonucleotide
  misc_feature 1..20: note = Target: FXN; (+) strand; PAM type: YTN; PAM sequence: TTT
  source 1..20: mol_type = other DNA
aagatagttgttcaaataaa

SEQ ID NO: 37498 - DNA, 20 bp, synthetic construct
  misc_feature 1..20: note = Description of Artificial Sequence: Synthetic oligonucleotide
  misc_feature 1..20: note = Target: FXN; (+) strand; PAM type: YTN; PAM sequence: TTA
  source 1..20: mol_type = other DNA
agatagttgttcaaataaac

SEQ ID NO: 37499 - DNA, 20 bp, synthetic construct
  misc_feature 1..20: note = Description of Artificial Sequence: Synthetic oligonucleotide
  misc_feature 1..20: note = Target: FXN; (+) strand; PAM type: YTN; PAM sequence: TTG
  source 1..20: mol_type = other DNA
ttcaaataaactctaaataa

SEQ ID NO: 37500 - DNA, 20 bp, synthetic construct
  misc_feature 1..20: note = Description of Artificial Sequence: Synthetic oligonucleotide
  misc_feature 1..20: note = Target: FXN; (+) strand; PAM type: YTN; PAM sequence: TTC
  source 1..20: mol_type = other DNA
aaataaactctaaataaccc

SEQ ID NO: 37501 - DNA, 20 bp, synthetic construct
  misc_feature 1..20: note = Description of Artificial Sequence: Synthetic oligonucleotide
  misc_feature 1..20: note = Target: FXN; (+) strand; PAM type: YTN; PAM sequence: CTC
  source 1..20: mol_type = other DNA
taaataaccccaactccaag

SEQ ID NO: 37502 - DNA, 20 bp, synthetic construct
  misc_feature 1..20: note = Description of Artificial Sequence: Synthetic oligonucleotide
  misc_feature 1..20: note = Target: FXN; (+) strand; PAM type: YTN; PAM sequence: CTA
  source 1..20: mol_type = other DNA
aataaccccaactccaagag

SEQ ID NO: 37503 - DNA, 20 bp, synthetic construct
  misc_feature 1..20: note = Description of Artificial Sequence: Synthetic oligonucleotide
  misc_feature 1..20: note = Target: FXN; (+) strand; PAM type: YTN; PAM sequence: CTC
  source 1..20: mol_type = other DNA
caagagtgttagcaagaaat

SEQ ID NO: 37504 - DNA, 20 bp, synthetic construct
  misc_feature 1..20: note = Description of Artificial Sequence: Synthetic oligonucleotide
  misc_feature 1..20: note = Target: FXN; (+) strand; PAM type: YTN; PAM sequence: TTA
  source 1..20: mol_type = other DNA
gcaagaaatataaattttac

SEQ ID NO: 37505 - DNA, 20 bp, synthetic construct
  misc_feature 1..20: note = Description of Artificial Sequence: Synthetic oligonucleotide
  misc_feature 1..20: note = Target: FXN; (+) strand; PAM type: YTN; PAM sequence: TTT
  source 1..20: mol_type = other DNA
tacagaagaatggttggagg

SEQ ID NO: 37506 - DNA, 20 bp, synthetic construct
  misc_feature 1..20: note = Description of Artificial Sequence: Synthetic oligonucleotide
  misc_feature 1..20: note = Target: FXN; (+) strand; PAM type: YTN; PAM sequence: TTT
  source 1..20: mol_type = other DNA
acagaagaatggttggaggt

SEQ ID NO: 37507 - DNA, 20 bp, synthetic construct
  misc_feature 1..20: note = Description of Artificial Sequence: Synthetic oligonucleotide
  misc_feature 1..20: note = Target: FXN; (+) strand; PAM type: YTN; PAM sequence: TTA
  source 1..20: mol_type = other DNA
cagaagaatggttggaggtg

SEQ ID NO: 37508 - DNA, 20 bp, synthetic construct
  misc_feature 1..20: note = Description of Artificial Sequence: Synthetic oligonucleotide
  misc_feature 1..20: note = Target: FXN; (+) strand; PAM type: YTN; PAM sequence: TTG
  source 1..20: mol_type = other DNA
gaggtggggagggtgtccac

SEQ ID NO: 37509 - DNA, 20 bp, synthetic construct
  misc_feature 1..20: note = Description of Artificial Sequence: Synthetic oligonucleotide
  misc_feature 1..20: note = Target: FXN; (+) strand; PAM type: YTN; PAM sequence: TTA
  source 1..20: mol_type = other DNA
cctcacacaggcacggaaaa

SEQ ID NO: 37510 - DNA, 20 bp, synthetic construct
  misc_feature 1..20: note = Description of Artificial Sequence: Synthetic oligonucleotide
  misc_feature 1..20: note = Target: FXN; (+) strand; PAM type: YTN; PAM sequence: CTC
  source 1..20: mol_type = other DNA
acacaggcacggaaaaactt

SEQ ID NO: 37511 - DNA, 20 bp, synthetic construct
  misc_feature 1..20: note = Description of Artificial Sequence: Synthetic oligonucleotide
  misc_feature 1..20: note = Target: FXN; (+) strand; PAM type: YTN; PAM sequence: CTT
  source 1..20: mol_type = other DNA
gaacctcctaaggacatttt

SEQ ID NO: 37512 - DNA, 20 bp, synthetic construct
  misc_feature 1..20: note = Description of Artificial Sequence: Synthetic oligonucleotide
  misc_feature 1..20: note = Target: FXN; (+) strand; PAM type: YTN; PAM sequence: TTG
  source 1..20: mol_type = other DNA
aacctcctaaggacattttt

SEQ ID NO: 37513 - DNA, 20 bp, synthetic construct
  misc_feature 1..20: note = Description of Artificial Sequence: Synthetic oligonucleotide
  misc_feature 1..20: note = Target: FXN; (+) strand; PAM type: YTN; PAM sequence: CTC
  source 1..20: mol_type = other DNA
ctaaggacatttttaagctc

SEQ ID NO: 37514 - DNA, 20 bp, synthetic construct
  misc_feature 1..20: note = Description of Artificial Sequence: Synthetic oligonucleotide
  misc_feature 1..20: note = Target: FXN; (+) strand; PAM type: YTN; PAM sequence: CTA
  source 1..20: mol_type = other DNA
aggacatttttaagctctct

SEQ ID NO: 37515-37545 - skipped (31 entries)

SEQ ID NO: 37546 - RNA, 100 nt, synthetic construct
  misc_feature 1..100: note = chemically synthesized
  source 1..100: mol_type = other RNA
  variation 1..20: note = n is a, c, g, u, or other
nnnnnnnnnnnnnnnnnnnngttttagagctagaaatagcaagttaaaataaggctagtccgttatcaacttgaaaaagtggcaccgagtcggtgctttt

SEQ ID NO: 37547 - RNA, 96 nt, synthetic construct
  misc_feature 1..96: note = chemically synthesized
  variation 1..20: note = n is a, c, g, u, or other
  source 1..96: mol_type = other RNA
nnnnnnnnnnnnnnnnnnnngttttagagctagaaatagcaagttaaaataaggctagtccgttatcaacttgaaaaagtggcaccgagtcggtgc

SEQ ID NO: 37548 - RNA, 114 nt, synthetic construct
  misc_feature 1..114: note = chemically synthesized
  variation 1..30: note = n is a, c, g, u, or other and this region may encompass 17-30 nucleotides
  misc_feature 107..114: note = This region may encompass 1-8 urasil;
  source 1..114: mol_type = other RNA
nnnnnnnnnnnnnnnnnnnnnnnnnnnnnngttttagagctagaaatagcaagttaaaataaggctagtccgttatcaacttgaaaaagtggcaccgagtcggtgctttttttt

SEQ ID NO: 37549 - DNA, 20 bp, synthetic construct
  misc_feature 1..20: note = Description of Artificial Sequence: Synthetic oligonucleotide
  misc_feature 1..20: note = Target: FXN; (-) strand; PAM type: NRG; PAM sequence: AGG
  source 1..20: mol_type = other DNA
gggccgggctgggtgacgcc
